(19) United States
(12) Patent Application Publication
(10) Pub. No.: US 2025/0333738 A1
(43) Pub. Date: Oct. 30, 2025

(54) POLYNUCLEIC ACID MOLECULES FOR INHIBITING EXPRESSION OF ANGPTL3, PHARMACEUTICAL COMPOSITIONS, AND USES THEREOF

(71) Applicant: Sirius Therapeutics, Inc., San Diego, CA (US)

(72) Inventors: Curt W. Bradshaw, San Diego, CA (US); Anthony Nicholas, Oregon, WI (US)

(21) Appl. No.: 19/264,729

(22) Filed: Jul. 9, 2025

Related U.S. Application Data
(63) Continuation of application No. PCT/US2024/011097, filed on Jan. 10, 2024.
(60) Provisional application No. 63/438,498, filed on Jan. 11, 2023.

(51) Int. Cl. C12N 15/113

(52) U.S. Cl. CPC C12N 15/113; C12N 2310/14; C12N 2310/321; C12N 2310/351

(57) ABSTRACT

Disclosed herein are polynucleic acid molecules that can be utilized for suppressing the expression of Angiopoietin-like protein 3 (ANGPTL3) gene. Also, described herein are pharmaceutical compositions comprising polynucleic acid molecules targeting Angiopoietin-like protein 3 (ANGPTL3) mRNA. Further, provided herein are methods for suppressing the expression of ANGPTL3 by utilizing the polynucleic acid molecules described herein.

### CROSS-REFERENCE

[0001] This application is a continuation of International Application No. PCT/US2024/011097, filed on Jan. 10, 2024, which claims the benefit of U.S. Provisional Application No. 63/438,498, filed on Jan. 11, 2023, all of which are incorporated herein by reference in their entirety.

### SEQUENCE LISTING

[0002] The instant application contains a Sequence Listing which has been submitting electronically in XML format and is hereby incorporated by reference in its entirety. Said XML copy, created Jul. 9, 2025, is named “61382-716_301_SL.xml” and is 3,303,719 bytes in size.

### BACKGROUND OF THE DISCLOSURE

[0003] The discovery of RNA interference (RNAi) as a cellular mechanism that selectively degrades mRNAs allows for both the targeted manipulation of cellular phenotypes in cell culture and the potential for development of directed therapeutics (Behlke, 2006, Mol. Ther. 13, 644-670; Xie et al., 2006, Drug Discov. Today 11, 67-73).

[0004] Hyperlipidermia is a global condition describing elevated lipid levels within the body. Hyperlipidermia is considered a major risk factor for atherosclerosis, coronary heart disease, and other vascular disease. Angiopoietin-like protein 3 or angiopoietin-like 3 (ANGPTL3) plays an important role in lipoprotein/plasma lipid metabolism and is produced primarily by cells in the liver. Inhibition of ANGPTL3 correlates with reductions of plasma lipids, including low-density lipoprotein (LDL) cholesterol, high-density lipoprotein (HDL) cholesterol, and triglycerides.

[0005] Accordingly, there is a need for developing an effective ANGPTL3 inhibitor without cytotoxicity. The polynucleic acid molecules, conjugates thereof, and methods described herein satisfy this need and provide related advantages.

### INCORPORATION BY REFERENCE

[0006] All publications, patents, and patent applications mentioned in this specification are herein incorporated by reference to the same extent as if each individual publication, patent, or patent application was specifically and individually indicated to be incorporated by reference. To the extent publications and patents or patent applications incorporated by reference contradict the disclosure contained in the specification, the specification is intended to supersede and/or take precedence over any such contradictory material.

### SUMMARY OF THE DISCLOSURE

[0007] To meet the need for a more effective ANGPTL3 inhibitor, provided herein, in one aspect, are a polynucleic acid molecule for modulating an expression of angiopoietin-like protein 3 or angiopoietin-like 3 (ANGPTL3) gene, wherein the polynucleic acid molecule comprises a nucleic acid sequence in Table 1, Table 2, Table 3, or Table 4.

[0008] In one aspect, the present disclosure provides a polynucleic acid molecule for modulating an expression of Angiopoietin-like protein 3 (ANGPTL3) gene, wherein the polynucleic acid molecule comprises a nucleic acid sequence in Table 1, Table 2, Table 3, or Table 4. In some embodiments, the polynucleic acid molecule is a single-stranded nucleic acid molecule. In some embodiments, the single-stranded nucleic acid molecule comprises at least 14, 15, 16, 17, 18 consecutive nucleotides that are complementary to a nucleic acid sequence selected from SEQ ID NOs: 401-596, 819-828, and 870-875, with no more than 1, 2, 3, 4 mismatches. In some embodiments, the single-stranded nucleic acid molecule comprises a sequence that is at least 80%, at least 85%, at least 90%, or at least 95% complementary to a nucleic acid sequence selected from SEQ ID NOs: 401-596, 819-828, and 870-875.

[0009] In some embodiments, the polynucleic acid molecule is a double-stranded nucleic acid molecule comprising a passenger strand and a guide strand. In some embodiments, the passenger strand comprises a nucleic acid sequence that is at least 80%, at least 85%, at least 90%, or at least 95% identical to a nucleic acid sequence selected from SEQ ID NOs: 401-596, 819-828, and 870-875. In some embodiments, the guide strand comprises a nucleic acid sequence that is at least 80%, at least 85%, at least 90%, or at least 95% identical to a nucleic acid sequence selected from SEQ ID NOs: 1-196, 797-806, and 850-857. In some embodiments, the passenger strand comprises a nucleic acid sequence comprising at least 14, 15, 16, 17, 18, 19, or 20 consecutive sequences of a sequence selected from SEQ ID NOs: 401-596, 819-828, and 870-875 with no more than 1, 2, 3, or 4 mismatches. In some embodiments, the guide strand comprises a nucleic acid sequence comprising at least 14, 15, 16, 17, 18, 19, 20, 21, or 22 consecutive sequences of a sequence selected from SEQ ID NOs: 1-196, 797-806, and 850-857 with no more than 1, 2, 3, or 4 mismatches. In some embodiments, the passenger strand comprises a nucleic acid sequence selected from SEQ ID NOs: 401-596, 819-828, and 870-875 and the guide strand comprises a nucleic acid sequence selected from SEQ ID NOs: 1-196, 797-806, and 850-857. In some embodiments, the passenger strand comprises a nucleic acid sequence that is at least 90%, or at least 95% identical to a nucleic acid sequence selected from Table 3 (SEQ ID NOs: 405, 407, 408, 411, 418, 420, 422, 440, 443-446, 450, 452, 453, 456, 508, 509, 513, 514, 545, 546, 548, 553, 557, 558, 819-828, and 870-875). In some embodiments, the guide strand comprises a nucleic acid sequence that is at least 90%, or at least 95% identical to a nucleic acid sequence selected from Table 3 (SEQ ID NOs: 5, 7, 8, 11, 18, 20, 22, 40, 43, 44, 45, 46, 50, 52, 53, 56, 108, 109, 113, 114, 145, 146, 148, 153, 157, 158, 797-806, and 850-857). In some embodiments, the passenger strand comprises a nucleic acid sequence selected from Table 3 (SEQ ID NOs: 405, 407, 408, 411, 418, 420, 422, 440, 443-446, 450, 452, 453, 456, 508, 509, 513, 514, 545, 546, 548, 553, 557, 558, 819-828, and 870-875) and the guide strand comprises a sequence selected from a nucleic acid sequence selected from Table 3 (SEQ ID NOs: 5, 7, 8, 11, 18, 20, 22, 40, 43, 44, 45, 46, 50, 52, 53, 56, 108, 109, 113, 114, 145, 146, 148, 153, 157, 158, 797-806, and 850-857).

[0010] In some embodiments, the polynucleic acid molecule comprises (1) a 2′-fluoro modified nucleotide; (2) a 2′-O-methyl modified nucleotide; (3) 2′-deoxy modified nucleotide, or (4) a modified internucleotide linkage. In some embodiments, the polynucleic acid molecule comprise at least two consecutive modified internucleotide linkages at the 5′ end. In some embodiments, the guide strand comprises at least two internucleotide linkages among 3 internucleotide linkages at the 3′end substituted with modified internucleotide linkages. In some embodiments, the guide strand comprises 5′-nNfnnnNfnNfNfnnnnNfnNfnnnnnnn-3′, 5′-nNfnnnNfnnnnnnnNfnNfnnnnnnn-3′, 5′-nNfnnnnNfnnnnNfnNfrnnnnnnnn-3′, 5′-nNfnnnnNfnnnnNfnNfnNfnnnnnnn-3′, or 5′-nNfnnnnnnnnnNfnNfnNfnnnnnnn-3′, wherein “Nf” stands for a 2′-fluoro modified nucleotide, and wherein “n” stands for a 2′-O-methyl modified nucleotide. In some embodiments, the passenger strand comprises 5′-nnnnnnNfnNfnNfnnnnnnnnnn-3′, 5′-nnnnnnNfnNfNfNfnnnnnnnnnn-3′, or 5′-nnnnnnnnNfNfNfnnnnnnnnnn-3′, wherein “Nf” stands for a 2′-fluoro modified nucleotide, and wherein “n” stands for a 2′-O-methyl modified nucleotide. In some embodiments, the passenger strand comprises 5′-NfnNfnNfnNfnNfNfNfnNfnNfnNfnNfnNf-3′, wherein the guide strand comprises 5′-nNfnNfnNfnNfnNfnnnNfnNfnNfnNfnnn-3′, wherein “Nf” stands for a 2′-fluoro modified nucleotide, and wherein “n” stands for a 2′-O-methyl modified nucleotide. In some embodiments, the passenger strand comprises 5′-nnnnnnNfnNfNfNfnnnnnnnnnn-3′, wherein the guide strand comprises 5′-nNfnnnNfnNfNfnnnnNfnNfnnnnnnn-3′, wherein “Nf” stands for a 2′-fluoro modified nucleotide, and wherein “n” stands for a 2′-O-methyl modified nucleotide. In some embodiments, the passenger strand comprises 5′-nnnnnnnnNfnNfnnnnnnnnnn-3′, wherein the guide strand comprises 5′-nNfnnnnnnnnnNfnNfnnnnnnnnn-3′, wherein “Nf” stands for a 2′-fluoro modified nucleotide, and wherein “n” stands for a 2′-O-methyl modified nucleotide. In some embodiments, the passenger strand comprises 5′-nnnnnnNfnNfnNfnnnnnnnnnn-3′, wherein the guide strand comprises 5′-nNfnnnnnnnnnNfnNfnNfhnnnnnn-3′, wherein “Nf” stands for a 2′-fluoro modified nucleotide, and wherein “n” stands for a 2′-O-methyl modified nucleotide. In some embodiments, the passenger strand comprises 5′-nnnnnnNfnNfnNfnnnnnnnnnn-3′, wherein the guide strand comprises 5′-_nNfnnnnNfnnnnNfnNfnNfnnnnnnn-3′, wherein “Nf” stands for a 2′-fluoro modified nucleotide, and wherein “n” stands for a 2′-O-methyl modified nucleotide.

[0011] In some embodiments, the modified intemucleotide linkage is a phosphorothioate intemucleotide linkage. In some embodiments, the modified intemucleotide linkage comprises a stereochemically enriched phosphorothioate intemucleotide linkage.. In some instances, the guide strand comprises a nucleotide analogue selected from a group consisting of acyclic L-threoninol nucleic acid-thymine-3′-phosphate (T-T), acyclic L-threoninol nucleic acid-adenine-3′-phosphate (T-A), acyclic N-acetyl L-threoninol abasic nucleic acid-3′phosphate (T-NAc), and 1′,2′-Dideoxyribose-3′phosphate (dAB). In some instances, the nucleotide analogue is located at a seed region of the guide strand (positions 2-8) from the 5′ end.

[0012] In some embodiments, the passenger strand comprises a nucleic acid sequence that is at least 80%, at least 85%, at least 90%, or at least 95% identical to a nucleic acid sequence selected from SEQ ID NOs: 601-796, 830-839, and 876-881. In some embodiments, the guide strand comprises a nucleic acid sequence that is at least 80%, at least 85%, at least 90%, or at least 95% identical to a nucleic acid sequence selected from SEQ ID NOs: 201-396, 808-817, and 858-868. In some embodiments, the passenger strand comprises a nucleic acid sequence selected from SEQ ID NOs: 601-796, 830-839, and 876-881 and the guide strand comprises a nucleic acid sequence selected from SEQ ID NOs: 201-396, 808-817, and 858-868. In some embodiments, the polynucleic acid molecule is 19-25 nucleotides in length. In some embodiments, the polynucleic acid molecule is 21-23 nucleotides in length.

[0013] In one aspect, the present disclosure provides a polynucleic acid molecule for modulating expression of Angiopoietin-like protein 3 (ANGPTL3) gene, wherein the polynucleic acid molecule comprises: (a) an guide strand comprising the nucleotide sequence selected from SEQ ID NOs: 5, 7, 8, 11, 18, 20, 22, 40, 43, 44, 45, 46, 50, 52, 53, 56, 108, 109, 113, 114, 145, 146, 148, 153, 157, 158, 797-806, and 850-857 and a passenger strand comprising the nucleotide sequence selected from SEQ ID NOs: 405, 407, 408, 411, 418, 420, 422, 440, 443-446, 450, 452, 453, 456, 508, 509, 513, 514, 545, 546, 548, 553, 557, 558, 819-828, and 870-875; (b) an guide strand comprising the nucleotide sequence selected from SEQ ID NOs: 205, 207, 208, 211, 218, 220, 222, 240, 243-246, 250, 252, 253, 256, 308, 309, 313, 314, 345, 346, 348, 353, 357, 358, 808-817, and 858-868, and a passenger strand comprising the nucleotide sequence selected from SEQ ID NOs: 605, 607, 608, 611, 618, 620, 622, 640, 643, 644, 645, 646, 650, 652, 653, 656, 708, 709, 713, 714, 745, 746, 748, 753, 757, 758, 830-839, and 876-881; (c)a guide strand comprising the nucleotide sequence of usUfsaguuGfguuuCfgUfgAfuuuccscsa (SEQ ID NO: 313) and a passenger strand comprising the nucleotide sequence of gsgsaaauCfaCfgAfaaccaacuaa (SEQ ID NO: 713); (d) a guide strand comprising the nucleotide sequence of usUfsagagUfauaaCfcUfuCfcauuususg (SEQ ID NO: 346) and a passenger strand comprising the nucleotide sequence of asasauggAfaGfgUfuauacucuaa (SEQ ID NO: 746); (e) a guide strand comprising the nucleotide sequence of usAfsuggaUfcaacAfuUfuUfgguugsasu (SEQ ID NO: 353) and a passenger strand comprising the nucleotide sequence of csasaccaAfaAfuGfuugauccaua (SEQ ID NO: 753); (f) a guide strand comprising the nucleotide sequence of usUfsaaggAfuuuaAfuAfcCfagauusasu (SEQ ID NO: 358) and a passenger strand comprising the nucleotide sequence of asasucugGfuAfuUfaaauccuuaa (SEQ ID NO: 758); (g) a guide strand comprising the nucleotide sequence of usAfsuuagAfuugcUfuCfaCfuauggsasg (SEQ ID NO: 308) and a passenger strand comprising the nucleotide sequence of cscsauagUfgAfaGfcaaucuaaua (SEQ ID NO: 708); (h) a guide strand comprising the nucleotide sequence of usUfsauagUfugguUfuCfgUfgauuuscsc (SEQ ID NO: 314) and a passenger strand comprising the nucleotide sequence of asasaucaCfgAfaAfccaacuauaa (SEQ ID NO: 714); (i) a guide strand comprising the nucleotide sequence of usAfsgaguAfuaacCfuUfcCfauuuusgsa (SEQ ID NO: 345) and a passenger strand comprising the nucleotide sequence of asasaaugGfaAfgGfuuauacucua (SEQ ID NO: 745); (j) a guide strand comprising the nucleotide sequence of usUfsaauuAfgauuGfcUfuCfacuausgsg (SEQ ID NO: 309) and a passenger strand comprising the nucleotide sequence of asusagugAfaGfcAfaucuaauuaa (SEQ ID NO: 709); (k) a guide strand comprising the nucleotide sequence of usAfsauuaGfauugCfuUfcAfcuaugsgsa (SEQ ID NO: 815) and a passenger strand comprising the nucleotide sequence of csasuaguGfaAfgCfaaucuaauua (SEQ ID NO: 837); (1) a guide strand comprising the nucleotide sequence of usUfsucauUfgaagUfuUfuGfugaucscsa (SEQ ID NO: 812) and a passenger strand comprising the nucleotide sequence of gsasucacAfaAfaCfuucaaugaaa (SEQ ID NO: 834); (m) a guide strand comprising the nucleotide sequence of usAfsuugcUfucacUfaUfgGfaguausasu (SEQ ID NO: 813) and a passenger strand comprising the nucleotide sequence of asusacucCfaUfaGfugaagcaaua (SEQ ID NO: 835); (n) a guide strand comprising the nucleotide sequence of usAfsgaguAfuaacCfuUfcCfauuucsgsa (SEQ ID NO: 865) and a passenger strand comprising the nucleotide sequence of gsasaaugGfaAfgGfuuauacucua (SEQ ID NO: 879); or (o) a guide strand comprising the nucleotide sequence of usAfsgaguAfuaacCfuUfcCfauuccsgsa (SEQ ID NO: 866) and a passenger strand comprising the nucleotide sequence of gsgsaaugGfaAfgGfuuauacucua (SEQ ID NO: 880), where smaller case “n” stands for 2′-O-methyl modified nucleotide, upper case followed with an “f” (i.e., “Nf”) stands for 2′-fluoro modified nucleotide, and “s” stands for 3′-phosphorothioate.

[0014] In another aspect, the present disclosure provides a polynucleic acid molecule conjugate for modulating an expression of Angiopoietin-like protein 3 (ANGPTL3) gene, wherein the polynucleic acid molecule conjugate comprises a polynucleic acid molecule described herein and an asialoglycoprotein receptor targeting moiety. In some embodiments, the polynucleic acid molecule and the asialoglycoprotein receptor targeting moiety is coupled via a linker. In some embodiments, the linker comprises formula (IV) below,

[chemical structure]

wherein at least one of Y1 and Y2 is a nucleotide in the polynucleic acid molecule. In some embodiments, the Y1 is the last nucleotide on the 3′ end of the passenger strand of the polynucleic acid molecule. In some embodiments, the Y1 and Y2 are two consecutive nucleotides in the polynucleic acid molecule. In some embodiments, the asialoglycoprotein receptor targeting moiety comprises N-Acetylgalactosamine (GalNAc). In some embodiments, the linker and the asialoglycoprotein receptor targeting moiety with the last nucleotide on the 3′ end of the passenger strand of the polynucleic acid molecule are shown in:

[chemical structure]

[chemical structure]

wherein Z in formula (V′), (V″ ″′), (V″″′), or (V″″″) is —H, —OH, —O-Methyl, —F, or —O— methoxyethyl, and R in formula (V′), (V″″), (V″″″), or (V″″″″) is adenine, uracil, guanine, cytosine, thymine, abasic, or others.

[0015] In one aspect, the present disclosure provides a pharmaceutical composition comprising a polynucleic acid molecule described herein, or a polynucleic acid molecule conjugate described herein, and a pharmaceutically acceptable excipient. In some embodiments, the pharmaceutical composition is formulated as a nanoparticle formulation. In some embodiments, the pharmaceutical composition is formulated for parenteral, oral, intranasal, buccal, rectal, transdermal, intravenous, subcutaneous, or intrathecal administration.

[0016] In one aspect, the present disclosure provides a method of modulating an mRNA expression of Angiopoietin-like protein 3 (ANGPTL3) gene in a subject, comprising: administering to the subject a polynucleic acid molecule described herein, a polynucleic acid molecule conjugate described herein, or a pharmaceutical composition described herein, thereby modulating the mRNA expression of ANGPTL3 gene in the subject.

[0017] In another aspect, the present disclosure provides a method of preventing, alleviating, or treating ANGPTL3-associated disease or symptom thereof in a subject in need thereof, comprising: administering to the subject a polynucleic acid molecule described herein, a polynucleic acid molecule conjugate described herein, or a pharmaceutical composition described herein, thereby preventing, alleviating, or treating ANGPTL3-associated disease or symptom thereof in the subject. In some embodiments, the ANGPTL3-associated disease or symptom thereof comprises hyperlipidermia. In some embodiments, the ANGPTL3-associated disease or symptom thereof comprises atherosclerosis, coronary heart disease, and vascular disease.

### BRIEF DESCRIPTION OF THE DRAWINGS

[0018] The novel features of the invention are set forth with particularity in the appended claims. A better understanding of the features and advantages of the present invention will be obtained by reference to the following detailed description that sets forth illustrative embodiments, in which the principles of the invention are utilized, and the accompanying drawings of which:

[0019] FIG. 1 depicts the inhibition efficacies of selected ANGPTL3 siRNAs for in vivo testing in mice in the Example 3. The results are shown in the average % change in serum hANGPTL3 protein levels from day −4 baseline. These results correspond to the data in Table 8.

[0020] FIG. 2 depicts the inhibition efficacies of selected ANGPTL3 siRNAs for in vivo testing in mice in the Example 4. The results are shown in the average % change in serum hANGPTL3 protein levels from day −4 baseline. This results correspond to the data in Table 9.

[0021] FIG. 3 depicts the inhibition efficacies of selected ANGPTL3 siRNAs for in vivo testing in mice in the Example 5. The results are shown in the average % change in serum hANGPTL3 protein levels from day −4 baseline. These results correspond to the data in Table 10.

[0022] FIG. 4 depicts the inhibition efficacies of selected ANGPTL3 siRNAs for in vivo testing in mice in the Example 6. The results are shown in the average % change in serum hANGPTL3 protein levels relative to the vehicle control group. These results correspond to the data in Table 11.

[0023] FIG. 5 depicts the inhibition efficacies of selected ANGPTL3 siRNAs for in vivo testing in cynomolgus monkeys in the Example 7. The results are shown in the average % change in serum ANGPTL3 relative to day 1. These results correspond to the data in Table 12.

[0024] FIG. 6 depicts ANGPTL3 mRNA expression level from liver tissue of cynomolgus monkeys in the Example 7. The results are shown in relative expression to the day −15.

[0025] FIG. 7 depicts the inhibition efficacies of selected ANGPTL3 siRNAs for in vivo testing in mice in the Example 8. The results are shown in the average % change in serum hANGPTL3 protein levels relative to the vehicle control group. The results correspond to the data in Table 13.

### DETAILED DESCRIPTION OF THE DISCLOSURE

[0026] Angiopoietin-like protein 3 or angiopoietin-like 3 (ANGPTL3) is a member of the angiopoietin-like protein family, which shares a structural similarity to angiopoietin protein family. ANGPTL3 is a secreted protein that is produced primarily by the liver cells and is notably expressed in kidney podocytes. ANGPTL3 regulates all 3 major lipids: LDL-cholesterol, HDL-cholesterol, and triglycerides. ANGPTL3 inhibits lipoprotein lipase (LPL) and endothelial lipase to modulate triglycerides and cholesterol metabolism.

[0027] The gene of ANGPTL3 is located on the shorter arm of chromosome 1 (1p31.3). The mRNA of ANGPTL3 (NM 014495.4) contains 2926 bp, which divides into 7 exons. ANGPTL3 is a 460-amino acid polypeptide comprising: a distinctive signal peptide sequence, a N-terminal coiled-coil domain, and a C-terminal globular fibrinogen-like domain. The N-terminal coiled-coil region (17-207 amino acid), especially at the amino acid domain 61-66, affects plasma triglyceride levels by inhibiting the catalytic activity of lipoprotein lipase (LPL). The C-terminal fibrogen-like domain (207−460 amino acid) can bind to integrin αvβ3 receptor, which affects angiogenesis. ANGPTL3 also contains a short linker region: Arg²²¹-Ala²²²-Pro²²³-Arg²²⁴, which is between N- and C-terminal domains. This liker region functions as furin cleavage sites located between amino acid residues Arg²²¹-Ala²²² and Arg²²⁴-Thr²²⁵. Similar to other members in the angiopoietin-like protein family, ANGPTL3 undergoes cleavage, resulting in separate fragments containing the N-terminal coiled-coil domain and the C-terminal fibrinogen-like domain, which appear to have different function. Both full length and truncated forms of ANGPTL3 are found in plasma. (see Tikka, A. et al., Endocrine. 2016:187-193; Wang, X. et al., JACC: Basic to Translational Science. 2019:755-762; Ono, M. et al., The Journal of Biological Chemistry. 2003:41804−41809; and NCBI Reference Sequence No: NM_014495.4).

[0028] Loss of function in the ANGPTL3 gene shows association with low levels of plasma LDL-cholesterol, HDL-cholesterol, and triglycerides. As such, targeting ANGPTL3 can achieve lipid-lowering therapy without causing severe side effect, and further provide method to reduce risk of atherosclerosis, coronary heart disease, and other vascular disease.

[0029] Described herein is a polynucleic acid molecule for modulating an expression of ANGPTL3 gene. In some aspects, the polynucleic acid molecule is a single-stranded nucleic acid molecule. In some aspects, the polynucleic acid molecule is a double-stranded nucleic acid molecule that comprises a sense strand (passenger strand) and an antisense strand (guide strand). In some aspects, the polynucleic acid molecule comprises a nucleic acid sequence in Table 1, Table 2, Table 3, or Table 4. Accordingly, provided herein are various target regions of human ANGPTL3 mRNA the polynucleic acid molecule described herein hybridizes to. In some embodiments, provided herein is the sequences of the polynucleic acid molecule described herein. In some embodiments, provided herein is the conjugates of the polynucleic acid molecule described herein. In some aspects, provided herein is the modifications of the polynucleic acid molecule described herein.

[0030] Also described herein is a method of modulating an expression of ANGPTL3 mRNA or protein in a subject. Described further herein is a method of preventing, alleviating, or treating ANGPTL3-associated disease or a symptom thereof in a subject in need thereof.

### Definitions

[0031] The singular form “a”, “an”, and “the” include plural references unless the context clearly dictates otherwise. For example, the term “a cell” includes one or more cells, including mixtures thereof. “A and/or B” is used herein to include all of the following alternatives: “A”, “B”, “A or B”, and “A and B.”

[0032] Where a range of values is provided, it is understood that each intervening value, to the tenth of the unit of the lower limit unless the context clearly dictates otherwise, between the upper and lower limit of that range and any other stated or intervening value in that stated range, is encompassed within the disclosure. The upper and lower limits of these smaller ranges may independently be included in the smaller ranges, and are also encompassed within the disclosure, subject to any specifically excluded limit in the stated range. Where the stated range includes one or both of the limits, ranges excluding either or both of those included limits are also included in the disclosure.

[0033] Certain ranges are presented herein with numerical values being preceded by the term “about.” The term “about” is used herein to provide literal support for the exact number that it precedes, as well as a number that is near to or approximately the number that the term precedes. In determining whether a number is near to or approximately a specifically recited number, the near or approximating unrecited number may be a number which, in the context in which it is presented, provides the substantial equivalent of the specifically recited number.

[0034] “Percent (%) sequence identity” or “Percent (%) identity” with respect to the nucleic acid sequences identified herein is defined as the percentage of nucleic acid in a candidate sequence that are identical with the nucleic acid sequence being compared, after aligning the sequences considering any conservative substitutions as part of the sequence identity.

[0035] All ranges disclosed herein also encompass any and all possible sub-ranges and combinations of sub-ranges thereof. Any listed range can be recognized as sufficiently describing and enabling the same range being broken down into at least equal halves, thirds, quarters, fifths, tenths, and so forth. As anon-limiting example, each range discussed herein can be readily broken down into a lower third, middle third and upper third, and the like. As will also be understood by one skilled in the art all language such as “up to,” “at least,” “greater than,” “less than,” and the like include the number recited and refer to ranges which can be subsequently broken down into sub-ranges as discussed above. Finally, as will be understood by one skilled in the art, a range includes each individual member. Thus, for example, a group having 1-3 articles refers to groups having 1, 2, or 3 articles. Similarly, a group having 1-5 articles refers to groups having 1, 2, 3, 4, or 5 articles, and so forth.

[0036] Unless defined otherwise, all technical and scientific terms used herein have the same meaning as commonly understood by one of ordinary skill in the art to which the polynucleic acid molecules, the polynucleic acid molecule conjugates, the pharmaceutical compositions, the methods and other aspects belong.

[0037] As used herein, the term “complementary” indicates a sufficient degree of complementarity between two nucleic acid molecules that bind stably and specifically to avoid nonspecific binding.

[0038] As used herein, the term “polynucleic acid” and the term “polynucleotide” are interchangeably used to refer a chain of nucleotides. The term “nucleotide” includes a sequence “G,” “C,” “A,” “T” and “U” each generally stand for a nucleotide that contains guanine, cytosine, adenine, thymidine and uracil as a base. In some instances, the “nucleotide” can refer to a modified nucleotide (e.g., with modified sugar moiety, modified base, modified internucleotide linkage, or combination thereof, including, but not limited to 2′-modified nucleotide, LNA, ENA, BNA, UNA, GNA etc.) In some instances, the “nucleotide” can refer to a modified nucleotide with a non-canonical base (e.g. including, but not limited to, 2-thiouridine, 2-thiothymidine, inosine, 2-aminopurine, 2,6-diaminopurine, dihydrouridine, 4-thiouridine, 4-thiothymidine, 2-thiocytidine).

[0039] As used herein, a “subject” can be any mammal, including a human and a non-human primate.

[0040] The term “condition,” as used herein, includes diseases, disorders, and susceptibilities. In some cases, the condition is an AGT related disorder or symptoms thereof.

[0041] As used herein, the term “treat,” “treating” or “treatment” of any disease or disorder refers, in one instance, to ameliorating the disease or disorder (i.e., slowing or arresting or reducing the development of the disease or at least one of the clinical symptoms thereof). In another instance, “treat”, “treating” or “treatment” refers to alleviating or ameliorating at least one physical parameter including those which may not be discernible by the patient. In yet another instance, “treat”, “treating” or “treatment” refers to modulating the disease or disorder, either physically, (e.g., stabilization of a discernible symptom), physiologically, (e.g., stabilization of a physical parameter), or both.

[0042] The terms “prevent,” “preventing,” and “prevention,” as used herein, refer to a decrease in the occurrence of pathology of a condition in a subject, who does not have, but is at risk of or susceptible to developing a disease or condition. The prevention may be complete, e.g., the total absence of pathology of a condition in a subject. The prevention may also be partial, such that the occurrence of pathology of a condition in a subject is less than that which would have occurred without the present disclosure.

[0043] “Administering” and its grammatical equivalents as used herein can refer to providing pharmaceutical compositions described herein to a subject or a patient. Conventional methods, known to those of ordinary skill in the art of medicine, can be used to administer the composition to the subject, depending upon the type of disease to be treated or the site of the disease. For example, the composition can be administered, e.g., orally, parenterally, by inhalation spray, topically, rectally, nasally, buccally, vaginally, via an implanted reservoir, or via infusion. One or more such routes can be employed.

[0044] The terms “pharmaceutical composition” and its grammatical equivalents as used herein can refer to a mixture or solution comprising a therapeutically effective amount of an active pharmaceutical ingredient together with one or more pharmaceutically acceptable excipients, carriers, and/or a therapeutic agent to be administered to a subject, e.g., a human in need thereof.

[0045] The term “pharmaceutically acceptable” and its grammatical equivalents as used herein can refer to an attribute of a material which is useful in preparing a pharmaceutical composition that is generally safe, non-toxic, and neither biologically nor otherwise undesirable and is acceptable for veterinary as well as human pharmaceutical use. “Pharmaceutically acceptable” can refer a material, such as a carrier or diluent, which does not abrogate the biological activity or properties of the compound, and is relatively nontoxic, i.e., the material may be administered to a subject without causing undesirable biological effects or interacting in a deleterious manner with any of the components of the pharmaceutical composition in which it is contained.

[0046] A “pharmaceutically acceptable excipient” refers to an excipient that can be administered to a subject, together with an agent, and which does not destroy the pharmacological activity thereof and is nontoxic when administered in doses sufficient to deliver a therapeutic amount of the agent.

[0047] The term “therapeutic agent” can refer to any agent that, when administered to a subject, has a therapeutic, diagnostic, and/or prophylactic effect and/or elicits a desired biological and/or pharmacological effect. Therapeutic agents can also be referred to as “actives” or “active agents.” Such agents include, but are not limited to, cytotoxins, radioactive ions, chemotherapeutic agents, small molecule drugs, proteins, and nucleic acids.

[0048] As used herein, the term “sense strand” can be interchangeably used with the term “passenger strand”, and the tern “antisense strand” can be interchangeably used with the term “guide strand”. In some instances, a nucleic acid sequence described herein for a sense strand and a passenger strand can be interchangeably used. Also, in some instances, a nucleic acid sequence described herein for an antisense strand and a guide strand can be interchangeably used.

[0049] As used herein, the term “consecutive sequence” refers to a sequence contains a number of consecutive nucleotides from a reference sequence. For example, if a reference sequence is N₁N₂N₃N₄N₅N₆N₇, a consecutive sequence can be N₁N₂N₃N₄ or N₃N₄N₅N₆, but a sequence of N₁N₃N₄N₅ or N₃N₄N₇ cannot be a consecutive sequence.

[0050] As used herein, the term “negative control” refers to a subject or a cell receiving no treatment or placebo.

[0051] It is appreciated that certain features of the polynucleic acid molecules, and/or polynucleic acid molecule conjugates, pharmaceutical composition comprising the polynucleic acid molecules or the polynucleic acid molecule conjugates, methods and other aspects, which are, for clarity, described in the context of separate embodiments, may also be provided in combination in a single embodiment. Conversely, various features of the polynucleic acid molecules, and/or polynucleic acid molecule conjugates, pharmaceutical composition comprising the polynucleic acid molecules or the polynucleic acid molecule conjugates, methods and other aspects, which are, for brevity, described in the context of a single embodiment, may also be provided separately or in any suitable sub-combination. All combinations of the embodiments are specifically embraced by the present disclosure and are disclosed herein just as if each and every combination was individually and explicitly disclosed, to the extent that such combinations embrace operable processes and/or compositions. In addition, all sub-combinations listed in the embodiments describing such variables are also specifically embraced by the present polynucleic acid molecules, and/or polynucleic acid molecule conjugates, pharmaceutical composition comprising the polynucleic acid molecules or the polynucleic acid molecule conjugates, methods and other aspects and are disclosed herein just as if each and every such sub-combination was individually and explicitly disclosed herein.

### Polynucleic Acid Molecules

### Target Regions of Polynucleic Acid Molecules

[0052] Described herein is a polynucleic acid molecule for modulating an expression of ANGPTL3 gene. In some instances, the polynucleic acid molecule comprises a single-stranded nucleic acid molecule that hybridizes to a certain region of mRNA. In some instances, the polynucleic acid molecule is a double-stranded nucleic acid molecule. Also described herein is a polynucleic acid molecule for modulating an expression of ANGPTL3 gene, wherein the polynucleic acid molecule is a double-stranded nucleic acid molecule, which comprises a passenger strand (a sense strand) and a guide strand (an antisense strand), and the guide strand hybridizes to a certain region of ANGPTL3 mRNA.

[0053] In some aspects, the polynucleic acid molecule described herein hybridizes to acertain region of human ANGPTL3 mRNA. In some instances, the human ANGPTL3 mRNA is as referred as NM_014495.4. In some aspects, the polynucleic acid molecule described herein hybridizes to a certain region of non-human ANGPTL3 mRNA.

[0054] In some aspects, the polynucleic acid molecule described herein hybridizes to the 5′ UTR region of human ANGPTL3 mRNA. In some aspects, the polynucleic acid molecule described herein hybridizes to the coding region of human ANGPTL3 mRNA. In some aspects, the polynucleic acid molecule described herein hybridizes to a portion of exon 1 of human ANGPTL3 mRNA. In some aspects, the polynucleic acid molecule described herein hybridizes to a portion of exon 2 of human ANGPTL3 mRNA. In some aspects, the polynucleic acid molecule described herein hybridizes to a portion of exon 3 of human ANGPTL3 mRNA. In some aspects, the polynucleic acid molecule described herein hybridizes to a portion of exon 4 of human ANGPTL3 mRNA. In some aspects, the polynucleic acid molecule described herein hybridizes to a portion of exon 5 of human ANGPTL3 mRNA. In some aspects, the polynucleic acid molecule described herein hybridizes to a portion of exon 6 of human ANGPTL3 mRNA. In some aspects, the polynucleic acid molecule described herein hybridizes to a portion of exon 7 of human ANGPTL3 mRNA. In some aspects, the polynucleic acid molecule described herein hybridizes to the 3′ UTR region of human ANGPTL3 mRNA.

[0055] In some aspects, the target region that the polynucleic acid molecule described herein hybridizes to is determined by ANGPTL3 silencing effectiveness and possible off-target effects. In some instances, the start of the target region fall between positions 1-10, 11-20, 21-30, 31-40, 41-50, 51-60, 61-70, 71-80, 81-90, or 91-100 of NM_014495.4. In some instances, the start of the target region fall between positions 101-110, 111-120, 121-130, 131-140, 141-150, 151-160, 161-170, 171-180, 181-190, or 191-200 of NM_014495.4. In some instances, the start of the target region fall between positions of 201-210, 211-220, 221-230, 231-240, 241-250, 251-260, 261-270, 271-280, 281-290, or 291-300 of NM_014495.4. In some instances, the start of the target region fall between positions 301-310, 311-320, 321-330, 331-340, 341-350, 351-360, 361-370, 371-380, 381-390, or 391-400 of NM_014495.4. In some instances, the start of the target region fall between positions 401-410, 411-420, 421-430, 431-440, 441-450, 451-460, 461-470, 471-480, 481-490, or 491-500 of NM_014495.4. In some instances, the start of the target region fall between positions 501-510, 511-520, 521-530, 531-540, 541-550, 551-560, 561-570, 571-580, 581-590, or 591-600 of NM_014495.4. In some instances, the start of the target region fall between positions 601-610, 611-620, 621-630, 631-640, 641-650, 651-660, 661-670, 671-680, 681-690, or 691-700 of NM_014495.4. In some instances, the start of the target region fall between positions 701-710, 711-720, 721-730, 731-740, 741-750, 751-760, 761-770, 771-780, 781-790, or 791-800 of NM_014495.4. In some instances, the start of the target region fall between positions 801-810, 811-820, 821-830, 831-840, 841-850, 851-860, 861-870, 871-880, 881-890, or 891-900 of NM_014495.4. In some instances, the start of the target region fall between positions 901-910, 911-920, 921-930, 931-940, 941-950, 951-960, 961-970, 971-980, 981-990, or 991-1000 of NM_014495.4. In some instances, the start of the target region fall between positions 1001-1010, 1011-1020, 1021-1030, 1031-1040, 1041-1050, 1051-1060, 1061-1070, 1071-1080, 1081-1090, or 1091-1100 of NM_014495.4. In some instances, the start of the target region fall between positions 1101-1110, 1111-1120, 1121-1130, 1131-1140, 1141-1150, 1151-1160, 1161-1170, 1171-1180, 1181-1190, or 1191-1200 of NM_014495.4. In some instances, the start of the target region fall between positions 1201-1210, 1211-1220, 1221-1230, 1231-1240, 1241-1250, 1251-1260, 1261-1270, 1271-1280, 1281-1290, or 1291-1300 of NM_014495.4. In some instances, the start of the target region fall between positions 1301-1310, 1311-1320, 1321-1330, 1331-1340, 1341-1350, 1351-1360, 1361-1370, 1371-1380, 1381-1390, or 1391-1400 of NM_014495.4. In some instances, the start of the target region fall between positions 1401-1410, 1411-1420, 1421-1430, 1431-1440, 1441-1450, 1451-1460, 1461-1470, 1471-1480, 1481-1490, or 1491-1500 of NM_014495.4. In some instances, the start of the target region fall between positions 1501-1510, 1511-1520, 1521-1530, 1531-1540, 1541-1550, 1551-1560, 1561-1570, 1571-1580, 1581-1590, or 1591-1600 of NM_014495.4. In some instances, the start of the target region fall between positions 1601-1610, 1611-1620, 1621-1630, 1631-1640, 1641-1650, 1651-1660, 1661-1670, 1671-1680, 1681-1690, or 1691-1700 of NM_014495.4. In some instances, the start of the target region fall between positions 1701-1710, 1711-1720, 1721-1730, 1731-1740, 1741-1750, 1751-1760, 1761-1770, 1771-1780, 1781-1790, or 1791-1800 of NM_014495.4. In some instances, the start of the target region fall between positions 1801-1810, 1811-1820, 1821-1830, 1831-1840, 1841-1850, 1851-1860, 1861-1870, 1871-1880, 1881-1890, or 1891-1900 of NM_014495.4. In some instances, the start of the target region fall between positions 1901-1910, 1911-1920, 1921-1930, 1931-1940, 1941-1950, 1951-1960, 1961-1970, 1971-1980, 1981-1990, or 1991-2000 of NM_014495.4. In some instances, the start of the target region fall between positions 2001-2010, 2011-2020, 2021-2030, 2031-2040, 2041-2050, 2051-2060, 2061-2070, 2071-2080, 2081-2090, or 2091-2100 of NM_014495.4. In some instances, the start of the target region fall between positions 2101-2110, 2111-2120, 2121-2130, 2131-2140, 2141-2150, 2151-2160, 2161-2170, 2171-2180, 2181-2190, or 2191-2200 of NM_014495.4. In some instances, the start of the target region fall between positions 2201-2210, 2211-2220, 2221-2230, 2231-2240, 2241-2250, 2251-2260, 2261-2270, 2271-2280, 2281-2290, or 2291-2300 of NM_014495.4. In some instances, the start of the target region fall between positions 2301-2310, 2311-2320, 2321-2330, 2331-2340, 2341-2350, 2351-2360, 2361-2370, 2371-2380, 2381-2390, or 2391-2400 of NM_014495.4. In some instances, the start of the target region fall between positions 2401-2410, 2411-2420, 2421-2430, 2431-2440, 2441-2450, 2451-2460, 2461-2470, 2471-2480, 2481-2490, or 2491-2500 of NM_014495.4. In some instances, the start of the target region fall between positions 2501-2510, 2511-2520, 2521-2530, 2531-2540, 2541-2550, 2551-2560, 2561-2570, 2571-2580, 2581-2590, or 2591-2600 of NM_014495.4. In some instances, the start of the target region fall between positions 2601-2610, 2611-2620, 2621-2630, 2631-2640, 2641-2650, 2651-2660, 2661-2670, 2671-2680, 2681-2690, or 2691-2700 of NM_014495.4. In some instances, the start of the target region fall between positions 2701-2710, 2711-2720, 2721-2730, 2731-2740, 2741-2750, 2751-2760, 2761-2770, 2771-2780, 2781-2790, or 2791-2800 of NM_014495.4. In some instances, the start of the target region fall between positions 2801-2810, 2811-2820, 2821-2830, 2831-2840, 2841-2850, 2851-2860, 2861-2870, 2871-2880, 2881-2890, or 2891-2900 of NM_014495.4. In some instances, the start of the target region fall between positions 2901-2910, 2911-2920, or 2921-2926 of NM_014495.4.

### Structure of Polynucleic Acid Molecules

### Single-Stranded Nucleic Acid Molecule

[0056] Described herein is a polynucleic acid molecule for modulating an expression of ANGPTL3 gene, wherein the polynucleic acid molecule comprises a single-stranded nucleic acid molecule that is reverse complementary to the target region of ANGPTL3 mRNA as described herein.

[0057] In some aspects, the polynucleic acid molecule described herein is not 100% complementary to the target region of ANGPTL3 mRNA. Accordingly, in some instances, the polynucleic acid molecule described herein is about 95% complementary to the target region of ANGPTL3 mRNA. In some instances, the polynucleic acid molecule described herein is about 90% complementary to the target region of ANGPTL3 mRNA. In some instances, the polynucleic acid molecule described herein is about 85% complementary to the target region of ANGPTL3 mRNA. In some instances, the polynucleic acid molecule described herein is about 80% complementary to the target region of ANGPTL3 mRNA. In some instances, the polynucleic acid molecule described herein is about 75% complementary to the target region of ANGPTL3 mRNA. In some instances, the polynucleic acid molecule described herein is about 70% complementary to the target region of ANGPTL3 mRNA.

[0058] In some aspects, the polynucleic acid molecule described herein comprises a nucleic acid sequence in Table 1, Table 2, Table 3, or Table 4. In some instances, the polynucleic acid molecule described herein comprises a nucleic acid sequence that is at least 80%, at least 85%, at least 90%, or at least 95% complementary to a nucleic acid sequence in Table 1, Table 2, Table 3, or Table 4. In some instances, the polynucleic acid molecule described herein comprises a nucleic acid sequence that is at least 80%, at least 85%, at least 90%, or at least 95% complementary to a nucleic acid sequence selected from SEQ ID NOs: 401-596, 819-828, and 870-875. In some instances, the polynucleic acid molecule described herein comprises a nucleic acid sequence that is at least 80%, at least 85%, at least 90%, or at least 95% complementary to a nucleic acid sequence selected from SEQ ID NOs: 405, 407, 408, 411, 418, 420, 422, 440, 443-446, 450, 452, 453, 456, 508, 509, 513, 514, 545, 546, 548, 553, 557, 558, 819-828, and 870-875. In some instances, the polynucleic acid molecule described herein comprises a nucleic acid sequence that is at least 80%, at least 85%, at least 90%, or at least 95% complementary to a nucleic acid sequence selected from SEQ ID NOs: 405, 407, 408, 411, 418, 420, 422, 440, 443-446, 450, 452, 453, 456, 508, 509, 513, 514, 545, 546, 548, 553, 557, 558, 819-828, and 870-875. In some instances, the polynucleic acid molecule described herein comprises a nucleic acid sequence that is at least 80%, at least 85%, at least 90%, or at least 95% complementary to a nucleic acid sequence selected from SEQ ID NOs: 513, 546, 553, 558, 508, 514, and 545.

[0059] In some instances, the polynucleic acid molecule described herein comprises a nucleic acid sequence that is at least 80%, at least 85%, at least 90%, or at least 95% complementary to a nucleic acid sequence in Table 1, Table 2, Table 3, or Table 4, excluding overhangs. In some instances, the polynucleic acid molecule described herein comprises a nucleic acid sequence that is at least 80%, at least 85%, at least 90%, or at least 95% complementary to a nucleic acid sequence selected from SEQ ID NOs: 401-596, 819-828, and 870-875, excluding overhangs. In some instances, the polynucleic acid molecule described herein comprises a nucleic acid sequence that is at least 80%, at least 85%, at least 90%, or at least 95% complementary to a nucleic acid sequence selected from SEQ ID NOs: 405, 407, 408, 411, 418, 420, 422, 440, 443-446, 450, 452, 453, 456, 508, 509, 513, 514, 545, 546, 548, 553, 557, 558, 819-828, and 870-875, excluding overhangs. In some instances, the polynucleic acid molecule described herein comprises a nucleic acid sequence that is at least 80%, at least 85%, at least 90%, or at least 95% complementary to a nucleic acid sequence selected from SEQ ID NOs: 405, 407, 408, 411, 418, 420, 422, 440, 443-446, 450, 452, 453, 456, 508, 509, 513, 514, 545, 546, 548, 553, 557, 558, 819-828, and 870-875, excluding overhangs. In some instances, the polynucleic acid molecule described herein comprises a nucleic acid sequence that is at least 80%, at least 85%, at least 90%, or at least 95% complementary to a nucleic acid sequence selected from SEQ ID NOs: 513, 546, 553, 558, 508, 514, and 545, excluding overhangs.

[0060] In yet other aspects, the polynucleic acid molecule described herein comprises a nucleic acid sequence comprising 14 consecutive nucleotides that are complementary to a nucleic acid sequence in Table 1, Table 2, Table 3, or Table 4 with no more than 1, 2, 3, or 4 mismatches. In some aspects, the polynucleic acid molecule described herein comprises a nucleic acid sequence comprising 14 consecutive (contiguous) nucleotides that are complementary to a nucleic acid sequence selected from SEQ ID NOs: 401-596, 819-828, and 870-875 with no more than 1, 2, 3, or 4 mismatches. In yet other aspects, the polynucleic acid molecule described herein comprises a nucleic acid sequence comprising 15 consecutive nucleotides that are complementary to a nucleic acid sequence in Table 1, Table 2, Table 3, or Table 4 with no more than 1, 2, 3, or 4 mismatches. In some aspects, the polynucleic acid molecule described herein comprises a nucleic acid sequence comprising 15 consecutive (contiguous) nucleotides that are complementary to a nucleic acid sequence selected from SEQ ID NOs: 401-596, 819-828, and 870-875 with no more than 1, 2, 3, or 4 mismatches. In yet other aspects, the polynucleic acid molecule described herein comprises a nucleic acid sequence comprising 16 consecutive nucleotides that are complementary to a nucleic acid sequence in Table 1, Table 2, Table 3, or Table 4 with no more than 1, 2, 3, or 4 mismatches. In some aspects, the polynucleic acid molecule described herein comprises a nucleic acid sequence comprising 16 consecutive (contiguous) nucleotides that are complementary to a nucleic acid sequence selected from SEQ ID NOs: 401-596, 819-828, and 870-875 with no more than 1, 2, 3, or 4 mismatches. In yet other aspects, the polynucleic acid molecule described herein comprises a nucleic acid sequence comprising 17 consecutive nucleotides that are complementary to a nucleic acid sequence in Table 1, Table 2, Table 3, or Table 4 with no more than 1, 2, 3, or 4 mismatches. In some aspects, the polynucleic acid molecule described herein comprises a nucleic acid sequence comprising 17 consecutive (contiguous) nucleotides that are complementary to a nucleic acid sequence selected from SEQ ID NOs: 401-596, 819-828, and 870-875 with no more than 1, 2, 3, or 4 mismatches. In yet other aspects, the polynucleic acid molecule described herein comprises a nucleic acid sequence comprising 18 consecutive nucleotides that are complementary to a nucleic acid sequence in Table 1, Table 2, Table 3, or Table 4 with no more than 1, 2, 3, or 4 mismatches. In some aspects, the polynucleic acid molecule described herein comprises a nucleic acid sequence comprising 18 consecutive (contiguous) nucleotides that are complementary to a nucleic acid sequence selected from SEQ ID NOs: 401-596, 819-828, and 870-875 with no more than 1, 2, 3, or 4 mismatches. In yet other aspects, the polynucleic acid molecule described herein comprises a nucleic acid sequence comprising 19 consecutive (contiguous) nucleotides that are complementary to a nucleic acid sequence in Table 1, Table 2, Table 3, or Table 4 with no more than 1, 2, 3, or 4 mismatches. In some aspects, the polynucleic acid molecule described herein comprises a nucleic acid sequence comprising 19 consecutive (contiguous) nucleotides that are complementary to a nucleic acid sequence selected from SEQ ID NOs: 401-596, 819-828, and 870-875 with no more than 1, 2, 3, or 4 mismatches. In yet other aspects, the polynucleic acid molecule described herein comprises a nucleic acid sequence comprising 20 consecutive (contiguous) nucleotides that are complementary to a nucleic acid sequence in Table 1, Table 2, Table 3, or Table 4 with no more than 1, 2, 3, or 4 mismatches. In some aspects, the polynucleic acid molecule described herein comprises a nucleic acid sequence comprising 20 consecutive (contiguous) nucleotides that are complementary to a nucleic acid sequence selected from SEQ ID NOs: 401-596, 819-828, and 870-875 with no more than 1, 2, 3, or 4 mismatches. In yet other aspects, the polynucleic acid molecule described herein comprises a nucleic acid sequence comprising 21 consecutive (contiguous) nucleotides that are complementary to a nucleic acid sequence in Table 1, Table 2, Table 3, or Table 4 with no more than 1, 2, 3, or 4 mismatches. In some aspects, the polynucleic acid molecule described herein comprises a nucleic acid sequence comprising 21 consecutive (contiguous) nucleotides that are complementary to a nucleic acid sequence selected from SEQ ID NOs: 401-596, 819-828, and 870-875 with no more than 1, 2, 3, or 4 mismatches. In yet other aspects, the polynucleic acid molecule described herein comprises a nucleic acid sequence comprising 22 consecutive (contiguous) nucleotides that are complementary to a nucleic acid sequence in Table 1, Table 2, Table 3, or Table 4 with no more than 1, 2, 3, or 4 mismatches. In some aspects, the polynucleic acid molecule described herein comprises a nucleic acid sequence comprising 22 consecutive (contiguous) nucleotides that are complementary to a nucleic acid sequence selected from SEQ ID NOs: 401-596, 819-828, and 870-875 with no more than 1, 2, 3, or 4 mismatches.

[0061] In some aspects, the polynucleic acid molecule described herein comprises a nucleic acid sequence comprising 14 consecutive nucleotides that are complementary to a nucleic acid sequence selected from SEQ ID NOs: 402-403, 405, 407-408, 410-411, 414-415, 418, 420-422, 432, 434, 442-446, 450-456, 460, 476-477, 496, 498, 507-509, 511, 513-514, 535, 545-546, 548-549, 553, 545-546, 548-549, 553, 557-558, 560-561, 819-828, and 870-875 with no more than 1, 2, 3, or 4 mismatches. In some aspects, the polynucleic acid molecule described herein comprises a nucleic acid sequence comprising 15 consecutive nucleotides that are complementary to a nucleic acid sequence selected from SEQ ID NOs: 402-403, 405, 407-408, 410-411, 414-415, 418, 420-422, 432, 434, 442-446, 450-456, 460, 476-477, 496, 498, 507-509, 511, 513-514, 535, 545-546, 548-549, 553, 545-546, 548-549, 553, 557-558, 560-561, 819-828, and 870-875 with no more than 1, 2, 3, or 4 mismatches. In some aspects, the polynucleic acid molecule described herein comprises a nucleic acid sequence comprising 16 consecutive nucleotides that are complementary to a nucleic acid sequence selected from SEQ ID NOs: 402-403, 405, 407-408, 410-411, 414-415, 418, 420-422, 432, 434, 442-446, 450-456, 460, 476-477, 496, 498, 507-509, 511, 513-514, 535, 545-546, 548-549, 553, 545-546, 548-549, 553, 557-558, 560-561, 819-828, and 870-875 with no more than 1, 2, 3, or 4 mismatches. In some aspects, the polynucleic acid molecule described herein comprises a nucleic acid sequence comprising 17 consecutive nucleotides that are complementary to a nucleic acid sequence selected from SEQ ID NOs: 402-403, 405, 407-408, 410-411, 414-415, 418, 420-422, 432, 434, 442-446, 450-456, 460, 476-477, 496, 498, 507-509, 511, 513-514, 535, 545-546, 548-549, 553, 545-546, 548-549, 553, 557-558, 560-561, 819-828, and 870-875 with no more than 1, 2, 3, or 4 mismatches. In some aspects, the polynucleic acid molecule described herein comprises a nucleic acid sequence comprising 18 consecutive nucleotides that are complementary to a nucleic acid sequence selected from SEQ ID NOs: 402-403, 405, 407-408, 410-411, 414-415, 418, 420-422, 432, 434, 442-446, 450-456, 460, 476-477, 496, 498, 507-509, 511, 513-514, 535, 545-546, 548-549, 553, 545-546, 548-549, 553, 557-558, 560-561, 819-828, and 870-875 with no more than 1, 2, 3, or 4 mismatches. In some aspects, the polynucleic acid molecule described herein comprises a nucleic acid sequence comprising 19 consecutive nucleotides that are complementary to a nucleic acid sequence selected from SEQ ID NOs: 402-403, 405, 407-408, 410-411, 414-415, 418, 420-422, 432, 434, 442-446, 450-456, 460, 476-477, 496, 498, 507-509, 511, 513-514, 535, 545-546, 548-549, 553, 545-546, 548-549, 553, 557-558, 560-561, 819-828, and 870-875 with no more than 1, 2, 3, or 4 mismatches. In some aspects, the polynucleic acid molecule described herein comprises a nucleic acid sequence comprising 20 consecutive nucleotides that are complementary to a nucleic acid sequence selected from SEQ ID NOs: 402-403, 405, 407-408, 410-411, 414-415, 418, 420-422, 432, 434, 442-446, 450-456, 460, 476-477, 496, 498, 507-509, 511, 513-514, 535, 545-546, 548-549, 553, 545-546, 548-549, 553, 557-558, 560-561, 819-828, and 870-875 with no more than 1, 2, 3, or 4 mismatches. In some aspects, the polynucleic acid molecule described herein comprises a nucleic acid sequence comprising 21 consecutive nucleotides that are complementary to a nucleic acid sequence selected from SEQ ID NOs: 402-403, 405, 407-408, 410-411, 414-415, 418, 420-422, 432, 434, 442-446, 450-456, 460, 476-477, 496, 498, 507-509, 511, 513-514, 535, 545-546, 548-549, 553, 545-546, 548-549, 553, 557-558, 560-561, 819-828, and 870-875 with no more than 1, 2, 3, or 4 mismatches. In some aspects, the polynucleic acid molecule described herein comprises a nucleic acid sequence comprising 22 consecutive nucleotides that are complementary to a nucleic acid sequence selected from SEQ ID NOs: 402-403, 405, 407-408, 410-411, 414-415, 418, 420-422, 432, 434, 442-446, 450-456, 460, 476-477, 496, 498, 507-509, 511, 513-514, 535, 545-546, 548-549, 553, 545-546, 548-549, 553, 557-558, 560-561, 819-828, and 870-875 with no more than 1, 2, 3, or 4 mismatches.

[0062] In some aspects, the polynucleic acid molecule described herein comprises a nucleic acid sequence comprising 14 consecutive nucleotides that are complementary to a nucleic acid sequence selected from SEQ ID NOs: 405, 407, 408, 411, 418, 420, 422, 440, 443-446, 450, 452, 453, 456, 508, 509, 513, 514, 545, 546, 548, 553, 557, 558, 819-828, and 870-875 with no more than 1, 2, 3, or 4 mismatches. In some aspects, the polynucleic acid molecule described herein comprises a nucleic acid sequence comprising 15 consecutive nucleotides that are complementary to a nucleic acid sequence selected from SEQ ID NOs: 405, 407, 408, 411, 418, 420, 422, 440, 443-446, 450, 452, 453, 456, 508, 509, 513, 514, 545, 546, 548, 553, 557, 558, 819-828, and 870-875 with no more than 1, 2, 3, or 4 mismatches. In some aspects, the polynucleic acid molecule described herein comprises a nucleic acid sequence comprising 16 consecutive nucleotides that are complementary to a nucleic acid sequence selected from SEQ ID NOs: 405, 407, 408, 411, 418, 420, 422, 440, 443-446, 450, 452, 453, 456, 508, 509, 513, 514, 545, 546, 548, 553, 557, 558, 819-828, and 870-875 with no more than 1, 2, 3, or 4 mismatches. In some aspects, the polynucleic acid molecule described herein comprises a nucleic acid sequence comprising 17 consecutive nucleotides that are complementary to a nucleic acid sequence selected from SEQ ID NOs: 405, 407, 408, 411, 418, 420, 422, 440, 443-446, 450, 452, 453, 456, 508, 509, 513, 514, 545, 546, 548, 553, 557, 558, 819-828, and 870-875 with no more than 1, 2, 3, or 4 mismatches. In some aspects, the polynucleic acid molecule described herein comprises a nucleic acid sequence comprising 18 consecutive nucleotides that are complementary to a nucleic acid sequence selected from SEQ ID NOs: 405, 407, 408, 411, 418, 420, 422, 440, 443-446, 450, 452, 453, 456, 508, 509, 513, 514, 545, 546, 548, 553, 557, 558, 819-828, and 870-875 with no more than 1, 2, 3, or 4 mismatches. In some aspects, the polynucleic acid molecule described herein comprises a nucleic acid sequence comprising 19 consecutive nucleotides that are complementary to a nucleic acid sequence selected from SEQ ID NOs: 405, 407, 408, 411, 418, 420, 422, 440, 443-446, 450, 452, 453, 456, 508, 509, 513, 514, 545, 546, 548, 553, 557, 558, 819-828, and 870-875 with no more than 1, 2, 3, or 4 mismatches. In some aspects, the polynucleic acid molecule described herein comprises a nucleic acid sequence comprising 20 consecutive nucleotides that are complementary to a nucleic acid sequence selected from SEQ ID NOs: 405, 407, 408, 411, 418, 420, 422, 440, 443-446, 450, 452, 453, 456, 508, 509, 513, 514, 545, 546, 548, 553, 557, 558, 819-828, and 870-875 with no more than 1, 2, 3, or 4 mismatches. In some aspects, the polynucleic acid molecule described herein comprises a nucleic acid sequence comprising 21 consecutive nucleotides that are complementary to a nucleic acid sequence selected from SEQ ID NOs: 405, 407, 408, 411, 418, 420, 422, 440, 443-446, 450, 452, 453, 456, 508, 509, 513, 514, 545, 546, 548, 553, 557, 558, 819-828, and 870-875 with no more than 1, 2, 3, or 4 mismatches. In some aspects, the polynucleic acid molecule described herein comprises a nucleic acid sequence comprising 22 consecutive nucleotides that are complementary to a nucleic acid sequence selected from SEQ ID NOs: 405, 407, 408, 411, 418, 420, 422, 440, 443-446, 450, 452, 453, 456, 508, 509, 513, 514, 545, 546, 548, 553, 557, 558, 819-828, and 870-875 with no more than 1, 2, 3, or 4 mismatches.

[0063] In some aspects, the polynucleic acid molecule described herein comprises a nucleic acid sequence comprising 14 consecutive nucleotides that are complementary to a nucleic acid sequence selected from SEQ ID NOs: 513, 546, 553, 558, 508, 514, and 545 with no more than 1, 2, 3, or 4 mismatches. In some aspects, the polynucleic acid molecule described herein comprises a nucleic acid sequence comprising 15 consecutive nucleotides that are complementary to a nucleic acid sequence selected from SEQ ID NOs: 513, 546, 553, 558, 508, 514, and 545 with no more than 1, 2, 3, or 4 mismatches. In some aspects, the polynucleic acid molecule described herein comprises a nucleic acid sequence comprising 16 consecutive nucleotides that are complementary to a nucleic acid sequence selected from SEQ ID NOs: 513, 546, 553, 558, 508, 514, and 545 with no more than 1, 2, 3, or 4 mismatches. In some aspects, the polynucleic acid molecule described herein comprises a nucleic acid sequence comprising 17 consecutive nucleotides that are complementary to a nucleic acid sequence selected from SEQ ID NOs: 513, 546, 553, 558, 508, 514, and 545 with no more than 1, 2, 3, or 4 mismatches. In some aspects, the polynucleic acid molecule described herein comprises a nucleic acid sequence comprising 18 consecutive nucleotides that are complementary to a nucleic acid sequence selected from SEQ ID NOs: 513, 546, 553, 558, 508, 514, and 545 with no more than 1, 2, 3, or 4 mismatches. In some aspects, the polynucleic acid molecule described herein comprises a nucleic acid sequence comprising 19 consecutive nucleotides that are complementary to a nucleic acid sequence selected from SEQ ID NOs: 513, 546, 553, 558, 508, 514, and 545 with no more than 1, 2, 3, or 4 mismatches. In some aspects, the polynucleic acid molecule described herein comprises a nucleic acid sequence comprising 20 consecutive nucleotides that are complementary to a nucleic acid sequence selected from SEQ ID NOs: 513, 546, 553, 558, 508, 514, and 545 with no more than 1, 2, 3, or 4 mismatches. In some aspects, the polynucleic acid molecule described herein comprises a nucleic acid sequence comprising 21 consecutive nucleotides that are complementary to a nucleic acid sequence selected from SEQ ID NOs: 513, 546, 553, 558, 508, 514, and 545 with no more than 1, 2, 3, or 4 mismatches. In some aspects, the polynucleic acid molecule described herein comprises a nucleic acid sequence comprising 22 consecutive nucleotides that are complementary to a nucleic acid sequence selected from SEQ ID NOs: 513, 546, 553, 558, 508, 514, and 545 with no more than 1, 2, 3, or 4 mismatches.

[0064] In yet other aspects, the polynucleic acid molecule described herein comprises a nucleic acid sequence comprising 14, 15, 16, 17, 18, 19, 20, 21, or 22 consecutive nucleotides that are complementary to a nucleic acid sequence in Table 1, Table 2, Table 3, or Table 4 without overhangs with no more than 1, 2, 3, or 4 mismatches. In some aspects, the polynucleic acid molecule described herein comprises a nucleic acid sequence comprising 14, 15, 16, 17, 18, 19, 20, 21, or 22 consecutive nucleotides that are complementary to a nucleic acid sequence selected from SEQ ID NOs: 401-596, 819-828, and 870-875 without overhangs with no more than 1, 2, 3, or 4 mismatches. In some aspects, the polynucleic acid molecule described herein comprises a nucleic acid sequence comprising 14, 15, 16, 17, 18, 19, 20, 21, or 22 consecutive nucleotides that are complementary to a nucleic acid sequence selected from SEQ ID NOs: 402-403, 405, 407-408, 410-411, 414-415, 418, 420-422, 432, 434, 442-446, 450-456, 460, 476-477, 496, 498, 507-509, 511, 513-514, 535, 545-546, 548-549, 553, 545-546, 548-549, 553, 557-558, 560-561, 819-828, and 870-875 without overhangs with no more than 1, 2, 3, or 4 mismatches. In some aspects, the polynucleic acid molecule described herein comprises a nucleic acid sequence comprising 14, 15, 16, 17, 18, 19, 20, 21, or 22 consecutive nucleotides that are complementary to a nucleic acid sequence selected from SEQ ID NOs: 405, 407, 408, 411, 418, 420, 422, 440, 443-446, 450, 452, 453, 456, 508, 509, 513, 514, 545, 546, 548, 553, 557, 558, 819-828, and 870-875 without overhangs with no more than 1, 2, 3, or 4 mismatches. In some aspects, the polynucleic acid molecule described herein comprises a nucleic acid sequence comprising 14, 15, 16, 17, 18, 19, 20, 21, or 22 consecutive nucleotides that are complementary to a nucleic acid sequence selected from SEQ ID NOs: 513, 546, 553, 558, 508, 514, and 545 without overhangs with no more than 1, 2, 3, or 4 mismatches.

[0065] In some aspects, the polynucleic acid molecule described herein comprises a strand of about 15-40, 16-30, 17-30, 18-30, 18-27, 18-25, 18-23, 19-23, 20-23, or 21-23 nucleotides in length. In some aspects, the polynucleic acid molecule described herein comprises a strand of about 15, 16, 17, 18, 19, 20 nucleotides in length. In some aspects, the polynucleic acid molecule described herein comprises a strand of about 21, 22, 23, 24, 25 nucleotides in length.

[0066] In some aspects, the polynucleic acid molecule described herein comprises a strand of about 26, 27, 28, 29, 30 nucleotides in length.

### Double-Stranded Nucleic Acid Molecule

[0067] Further described herein is a polynucleic acid molecule for modulating expression of ANGPTL3 gene, wherein the polynucleic acid molecule is a double-stranded molecule that comprises a passenger strand (a sense strand) and a guide strand (an antisense strand), and the guide strand is reverse complementary to the target region of ANGPTL3 mRNA as described above.

[0068] In some aspects, the guide strand described herein is 100% complementary to the target region of ANGPTL3 mRNA. In other aspects, the guide strand described herein is not 100% complementary to the target region of ANGPTL3 mRNA. Accordingly, in some instances, the guide strand described herein is about 95% complementary to the target region of ANGPTL3 mRNA. In some aspects, the guide strand described herein is about 90% complementary to the target region of ANGPTL3 mRNA. In some aspects, the guide strand described herein is about 85% complementary to the target region of ANGPTL3 mRNA. In some aspects, the guide strand described herein is about 80% complementary to the target region of ANGPTL3 mRNA. In some aspects, the guide strand described herein is about 75% complementary to the target region of ANGPTL3 mRNA. In some aspects, the guide strand described herein is about 70% complementary to the target region of ANGPTL3 mRNA.

[0069] In some aspects, the polynucleic acid molecule described herein comprises a nucleic acid sequence in Table 1, Table 2, Table 3, or Table 4. In other aspects, the polynucleic acid molecule described herein comprises a nucleic acid sequence that is at least 80%, at least 85%, at least 90%, or at least 95% identical to a sequence in Table 1, Table 2, Table 3, or Table 4. In some instances, the passenger strand described herein comprises a nucleic acid sequence that is at least 80%, at least 85%, at least 90%, or at least 95% identical to a nucleic acid sequence selected from SEQ ID NOs: 401-596, 819-828, and 870-875. In some instances, the guide strand described herein comprises a nucleic acid sequence that is at least 80%, at least 85%, at least 90%, or at least 95% identical to a nucleic acid sequence selected from SEQ ID NOs: 1-196, 797-806, and 850-857. In some instances, the passenger strand described herein comprises a nucleic acid sequence that is at least 80%, at least 85%, at least 90%, or at least 95% identical to a nucleic acid sequence selected from SEQ ID NOs: 402-403, 405, 407-408, 410-411, 414-415, 418, 420-422, 432, 434, 442-446, 450-456, 460, 476-477, 496, 498, 507-509, 511, 513-514, 535, 545-546, 548-549, 553, 545-546, 548-549, 553, 557-558, 560-561, 819-828, and 870-875. In some instances, the guide strand described herein comprises a nucleic acid sequence that is at least 80%, at least 85%, at least 90%, or at least 95% identical to a nucleic acid sequence selected from SEQ ID NOs: 2-3, 5, 7-8, 10-11, 14-15, 18, 20-22, 32, 34, 42-46, 50-56, 60, 76-77, 96, 98, 107-109, 111, 113-114, 135, 145-146, 148-149, 153, 157-158, 160-161, 797-806, and 850-857. In some instances, the passenger strand described herein comprises a nucleic acid sequence that is at least 80%, at least 85%, at least 90%, or at least 95% identical to a nucleic acid sequence selected from SEQ ID NOs: 405, 407, 408, 411, 418, 420, 422, 440, 443-446, 450, 452, 453, 456, 508, 509, 513, 514, 545, 546, 548, 553, 557, 558, 819-828, and 870-875. In some instances, the guide strand described herein comprises a nucleic acid sequence that is at least 80%, at least 85%, at least 90%, or at least 95% identical to a nucleic acid sequence selected from SEQ ID NOs: 5, 7, 8, 11, 18, 20, 22, 40, 43, 44, 45, 46, 50, 52, 53, 56, 108, 109, 113, 114, 145, 146, 148, 153, 157, 158, 797-806, and 850-857. In some instances, the passenger strand described herein comprises a nucleic acid sequence that is at least 80%, at least 85%, at least 90%, or at least 95% identical to a nucleic acid sequence selected from SEQ ID NOs: 513, 546, 553, 558, 508, 514, and 545. In some instances, the guide strand described herein comprises a nucleic acid sequence that is at least 80%, at least 85%, at least 90%, or at least 95% identical to a nucleic acid sequence selected from SEQ ID NOs: 113, 146, 153, 158, 108, 114, and 145.

[0070] In yet other aspects, the polynucleic acid molecule described herein comprises a nucleic acid sequence comprising 14 consecutive sequences out of the sequences in Table 1, Table 2, Table 3, or Table 4 with no more than 1, 2, 3, or 4 mismatches. In some aspects, the passenger strand described herein comprises a nucleic acid sequence comprising 14 consecutive sequences selected from SEQ ID NOs: 401-596, 819-828, and 870-875 with no more than 1, 2, 3, or 4 mismatches. In some aspects, the guide strand described herein comprises a nucleic acid sequence comprising 14 consecutive sequences selected from SEQ ID NOs: 1-196, 797-806, and 850-857 with no more than 1, 2, 3, or 4 mismatches. In yet other aspects, the polynucleic acid molecule described herein comprises a nucleic acid sequence comprising 15 consecutive sequences out of the sequences in Table 1, Table 2, Table 3, or Table 4 with no more than 1, 2, 3, or 4 mismatches. In some aspects, the passenger strand described herein comprises a nucleic acid sequence comprising 15 consecutive sequences selected from SEQ ID NOs: 401-596, 819-828, and 870-875 with no more than 1, 2, 3, or 4 mismatches. In some aspects, the guide strand described herein comprises a nucleic acid sequence comprising 15 consecutive sequences selected from SEQ ID NOs: 1-196, 797-806, and 850-857 with no more than 1, 2, 3, or 4 mismatches. In yet still other aspects, the polynucleic acid molecule described herein comprises a nucleic acid sequence comprising 16 consecutive sequences out of the sequences in Table 1, Table 2, Table 3, or Table 4 with no more than 1, 2, 3, or 4 mismatches. In some aspects, the passenger strand described herein comprises a nucleic acid sequence comprising 16 consecutive sequences selected from SEQ ID NOs: 401-596, 819-828, and 870-875 with no more than 1, 2, 3, or 4 mismatches. In some aspects, the guide strand described herein comprises a nucleic acid sequence comprising 16 consecutive sequences selected from SEQ ID NOs: 1-196, 797-806, and 850-857 with no more than 1, 2, 3, or 4 mismatches. In yet still other aspects, the polynucleic acid molecule described herein comprises a nucleic acid sequence comprising 17 consecutive sequences out of the sequences in Table 1, Table 2, Table 3, or Table 4 with no more than 1, 2, 3, or 4 mismatches. In some aspects, the passenger strand described herein comprises a nucleic acid sequence comprising 17 consecutive sequences selected from SEQ ID NOs: 401-596, 819-828, and 870-875 with no more than 1, 2, 3, or 4 mismatches. In some aspects, the guide strand described herein comprises a nucleic acid sequence comprising 17 consecutive sequences selected from SEQ ID NOs: 1-196, 797-806, and 850-857 with no more than 1, 2, 3, or 4 mismatches. In yet other aspects, the polynucleic acid molecule described herein comprises a nucleic acid sequence comprising 18 consecutive sequences out of the sequences in Table 1, Table 2, Table 3, or Table 4 with no more than 1, 2, 3, or 4 mismatches. In some aspects, the passenger strand described herein comprises a nucleic acid sequence comprising 18 consecutive sequences selected from SEQ ID NOs: 401-596, 819-828, and 870-875 with no more than 1, 2, 3, or 4 mismatches. In some aspects, the guide strand described herein comprises a nucleic acid sequence comprising 18 consecutive sequences selected from SEQ ID NOs: 1-196, 797-806, and 850-857 with no more than 1, 2, 3, or 4 mismatches. In yet other aspects, the polynucleic acid molecule described herein comprises a nucleic acid sequence comprising 19 consecutive sequences out of the sequences in Table 1, Table 2, Table 3, or Table 4 with no more than 1, 2, 3, or 4 mismatches. In some aspects, the passenger strand described herein comprises a nucleic acid sequence comprising 19 consecutive sequences selected from SEQ ID NOs: 401-596, 819-828, and 870-875 with no more than 1, 2, 3, or 4 mismatches. In some aspects, the guide strand described herein comprises a nucleic acid sequence comprising 19 consecutive sequences selected from SEQ ID NOs: 1-196, 797-806, and 850-857 with no more than 1, 2, 3, or 4 mismatches. In yet other aspects, the polynucleic acid molecule described herein comprises a nucleic acid sequence comprising 20 consecutive sequences out of the sequences in Table 1, Table 2, Table 3, or Table 4 with no more than 1, 2, 3, or 4 mismatches. In some aspects, the passenger strand described herein comprises a nucleic acid sequence comprising 20 consecutive sequences selected from SEQ ID NOs: 401-596, 819-828, and 870-875 with no more than 1, 2, 3, or 4 mismatches. In some aspects, the guide strand described herein comprises a nucleic acid sequence comprising 20 consecutive sequences selected from SEQ ID NOs: 1-196, 797-806, and 850-857 with no more than 1, 2, 3, or 4 mismatches. In yet other aspects, the polynucleic acid molecule described herein comprises a nucleic acid sequence comprising 21 consecutive sequences out of the sequences in Table 1, Table 2, Table 3, or Table 4 with no more than 1, 2, 3, or 4 mismatches. In some aspects, the passenger strand described herein comprises a nucleic acid sequence comprising 21 consecutive sequences selected from SEQ ID NOs: 401-596, 819-828, and 870-875 with no more than 1, 2, 3, or 4 mismatches. In some aspects, the guide strand described herein comprises a nucleic acid sequence comprising 21 consecutive sequences selected from SEQ ID NOs: 1-196, 797-806, and 850-857 with no more than 1, 2, 3, or 4 mismatches. In yet other aspects, the polynucleic acid molecule described herein comprises a nucleic acid sequence comprising 22 consecutive sequences out of the sequences in Table 1, Table 2, Table 3, or Table 4 with no more than 1, 2, 3, or 4 mismatches. In some aspects, the passenger strand described herein comprises a nucleic acid sequence comprising 22 consecutive sequences selected from SEQ ID NOs: 401-596, 819-828, and 870-875 with no more than 1, 2, 3, or 4 mismatches. In some aspects, the guide strand described herein comprises a nucleic acid sequence comprising 22 consecutive sequences selected from SEQ ID NOs: 1-196, 797-806, and 850-857 with no more than 1, 2, 3, or 4 mismatches.

[0071] In some aspects, the passenger strand described herein comprises a nucleic acid sequence comprising 15 consecutive sequences selected from SEQ ID NOs: 402-403, 405, 407-408, 410-411, 414-415, 418, 420-422, 432, 434, 442-446, 450-456, 460, 476-477, 496, 498, 507-509, 511, 513-514, 535, 545-546, 548-549, 553, 557-558, 560-561, 819-828, and 870-875 with no more than 1, 2, 3, or 4 mismatches. In some aspects, the guide strand described herein comprises a nucleic acid sequence comprising 15 consecutive sequences selected from SEQ ID NOs: 2-3, 5, 7-8, 10-11, 14-15, 18, 20-22, 32, 34, 42-46, 50-56, 60, 76-77, 96, 98, 107-109, 111, 113-114, 135, 145-146, 148-149, 153, 157-158, 160-161, 797-806, and 850-857 with no more than 1, 2, 3, or 4 mismatches. In some aspects, the passenger strand described herein comprises a nucleic acid sequence comprising 16 consecutive sequences selected from SEQ ID NOs: 402-403, 405, 407-408, 410-411, 414-415, 418, 420-422, 432, 434, 442-446, 450-456, 460, 476-477, 496, 498, 507-509, 511, 513-514, 535, 545-546, 548-549, 553, 557-558, 560-561, 819-828, and 870-875 with no more than 1, 2, 3, or 4 mismatches. In some aspects, the guide strand described herein comprises a nucleic acid sequence comprising 16 consecutive sequences selected from SEQ ID NOs: 2-3, 5, 7-8, 10-11, 14-15, 18, 20-22, 32, 34, 42-46, 50-56, 60, 76-77, 96, 98, 107-109, 111, 113-114, 135, 145-146, 148-149, 153, 157-158, 160-161, 797-806, and 850-857 with no more than 1, 2, 3, or 4 mismatches. In some aspects, the passenger strand described herein comprises a nucleic acid sequence comprising 17 consecutive sequences selected from SEQ ID NOs: 402-403, 405, 407-408, 410-411, 414-415, 418, 420-422, 432, 434, 442-446, 450-456, 460, 476-477, 496, 498, 507-509, 511, 513-514, 535, 545-546, 548-549, 553, 557-558, 560-561, 819-828, and 870-875 with no more than 1, 2, 3, or 4 mismatches. In some aspects, the guide strand described herein comprises a nucleic acid sequence comprising 17 consecutive sequences selected from SEQ ID NOs: 2-3, 5, 7-8, 10-11, 14-15, 18, 20-22, 32, 34, 42-46, 50-56, 60, 76-77, 96, 98, 107-109, 111, 113-114, 135, 145-146, 148-149, 153, 157-158, 160-161, 797-806, and 850-857 with no more than 1, 2, 3, or 4 mismatches. In some aspects, the passenger strand described herein comprises a nucleic acid sequence comprising 18 consecutive sequences selected from SEQ ID NOs: 402-403, 405, 407-408, 410-411, 414-415, 418, 420-422, 432, 434, 442-446, 450-456, 460, 476-477, 496, 498, 507-509, 511, 513-514, 535, 545-546, 548-549, 553, 557-558, 560-561, 819-828, and 870-875 with no more than 1, 2, 3, or 4 mismatches. In some aspects, the guide strand described herein comprises a nucleic acid sequence comprising 18 consecutive sequences selected from SEQ ID NOs: 2-3, 5, 7-8, 10-11, 14-15, 18, 20-22, 32, 34, 42-46, 50-56, 60, 76-77, 96, 98, 107-109, 111, 113-114, 135, 145-146, 148-149, 153, 157-158, 160-161, 797-806, and 850-857 with no more than 1, 2, 3, or 4 mismatches. In some aspects, the passenger strand described herein comprises a nucleic acid sequence comprising 19 consecutive sequences selected from SEQ ID NOs: 402-403, 405, 407-408, 410-411, 414-415, 418, 420-422, 432, 434, 442-446, 450-456, 460, 476-477, 496, 498, 507-509, 511, 513-514, 535, 545-546, 548-549, 553, 557-558, 560-561, 819-828, and 870-875 with no more than 1, 2, 3, or 4 mismatches. In some aspects, the guide strand described herein comprises a nucleic acid sequence comprising 19 consecutive sequences selected from SEQ ID NOs: 2-3, 5, 7-8, 10-11, 14-15, 18, 20-22, 32, 34, 42-46, 50-56, 60, 76-77, 96, 98, 107-109, 111, 113-114, 135, 145-146, 148-149, 153, 157-158, 160-161, 797-806, and 850-857 with no more than 1, 2, 3, or 4 mismatches. In some aspects, the passenger strand described herein comprises a nucleic acid sequence comprising 20 consecutive sequences selected from SEQ ID NOs: 402-403, 405, 407-408, 410-411, 414-415, 418, 420-422, 432, 434, 442-446, 450-456, 460, 476-477, 496, 498, 507-509, 511, 513-514, 535, 545-546, 548-549, 553, 557-558, 560-561, 819-828, and 870-875 with no more than 1, 2, 3, or 4 mismatches. In some aspects, the guide strand described herein comprises a nucleic acid sequence comprising 20 consecutive sequences selected from SEQ ID NOs: 2-3, 5, 7-8, 10-11, 14-15, 18, 20-22, 32, 34, 42-46, 50-56, 60, 76-77, 96, 98, 107-109, 111, 113-114, 135, 145-146, 148-149, 153, 157-158, 160-161, 797-806, and 850-857 with no more than 1, 2, 3, or 4 mismatches. In some aspects, the passenger strand described herein comprises a nucleic acid sequence comprising 21 consecutive sequences selected from SEQ ID NOs: 402-403, 405, 407-408, 410-411, 414-415, 418, 420-422, 432, 434, 442-446, 450-456, 460, 476-477, 496, 498, 507-509, 511, 513-514, 535, 545-546, 548-549, 553, 557-558, 560-561, 819-828, and 870-875 with no more than 1, 2, 3, or 4 mismatches. In some aspects, the guide strand described herein comprises a nucleic acid sequence comprising 21 consecutive sequences selected from SEQ ID NOs: 2-3, 5, 7-8, 10-11, 14-15, 18, 20-22, 32, 34, 42-46, 50-56, 60, 76-77, 96, 98, 107-109, 111, 113-114, 135, 145-146, 148-149, 153, 157-158, 160-161, 797-806, and 850-857 with no more than 1, 2, 3, or 4 mismatches. In some aspects, the passenger strand described herein comprises a nucleic acid sequence comprising 22 consecutive sequences selected from SEQ ID NOs: 402-403, 405, 407-408, 410-411, 414-415, 418, 420-422, 432, 434, 442-446, 450-456, 460, 476-477, 496, 498, 507-509, 511, 513-514, 535, 545-546, 548-549, 553, 557-558, 560-561, 819-828, and 870-875 with no more than 1, 2, 3, or 4 mismatches. In some aspects, the guide strand described herein comprises a nucleic acid sequence comprising 22 consecutive sequences selected from SEQ ID NOs: 2-3, 5, 7-8, 10-11, 14-15, 18, 20-22, 32, 34, 42-46, 50-56, 60, 76-77, 96, 98, 107-109, 111, 113-114, 135, 145-146, 148-149, 153, 157-158, 160-161, 797-806, and 850-857 with no more than 1, 2, 3, or 4 mismatches.

[0072] In some aspects, the passenger strand described herein comprises a nucleic acid sequence comprising 15 consecutive sequences selected from SEQ ID NOs: 405, 407, 408, 411, 418, 420, 422, 440, 443-446, 450, 452, 453, 456, 508, 509, 513, 514, 545, 546, 548, 553, 557, 558, 819-828, and 870-875 with no more than 1, 2, 3, or 4 mismatches. In some aspects, the guide strand described herein comprises a nucleic acid sequence comprising 15 consecutive sequences selected from SEQ ID NOs: 5, 7, 8, 11, 18, 20, 22, 40, 43, 44, 45, 46, 50, 52, 53, 56, 108, 109, 113, 114, 145, 146, 148, 153, 157, 158, 797-806, and 850-857 with no more than 1, 2, 3, or 4 mismatches. In some aspects, the passenger strand described herein comprises a nucleic acid sequence comprising 16 consecutive sequences selected from SEQ ID NOs: 405, 407, 408, 411, 418, 420, 422, 440, 443-446, 450, 452, 453, 456, 508, 509, 513, 514, 545, 546, 548, 553, 557, 558, 819-828, and 870-875 with no more than 1, 2, 3, or 4 mismatches. In some aspects, the guide strand described herein comprises a nucleic acid sequence comprising 16 consecutive sequences selected from SEQ ID NOs: 5, 7, 8, 11, 18, 20, 22, 40, 43, 44, 45, 46, 50, 52, 53, 56, 108, 109, 113, 114, 145, 146, 148, 153, 157, 158, 797-806, and 850-857 with no more than 1, 2, 3, or 4 mismatches. In some aspects, the passenger strand described herein comprises a nucleic acid sequence comprising 17 consecutive sequences selected from SEQ ID NOs: 405, 407, 408, 411, 418, 420, 422, 440, 443-446, 450, 452, 453, 456, 508, 509, 513, 514, 545, 546, 548, 553, 557, 558, 819-828, and 870-875 with no more than 1, 2, 3, or 4 mismatches. In some aspects, the guide strand described herein comprises a nucleic acid sequence comprising 17 consecutive sequences selected from SEQ ID NOs: 5, 7, 8, 11, 18, 20, 22, 40, 43, 44, 45, 46, 50, 52, 53, 56, 108, 109, 113, 114, 145, 146, 148, 153, 157, 158, 797-806, and 850-857 with no more than 1, 2, 3, or 4 mismatches. In some aspects, the passenger strand described herein comprises a nucleic acid sequence comprising 18 consecutive sequences selected from SEQ ID NOs: 405, 407, 408, 411, 418, 420, 422, 440, 443-446, 450, 452, 453, 456, 508, 509, 513, 514, 545, 546, 548, 553, 557, 558, 819-828, and 870-875 with no more than 1, 2, 3, or 4 mismatches. In some aspects, the guide strand described herein comprises a nucleic acid sequence comprising 18 consecutive sequences selected from SEQ ID NOs: 5, 7, 8, 11, 18, 20, 22, 40, 43, 44, 45, 46, 50, 52, 53, 56, 108, 109, 113, 114, 145, 146, 148, 153, 157, 158, 797-806, and 850-857 with no more than 1, 2, 3, or 4 mismatches. In some aspects, the passenger strand described herein comprises a nucleic acid sequence comprising 19 consecutive sequences selected from SEQ ID NOs: 405, 407, 408, 411, 418, 420, 422, 440, 443-446, 450, 452, 453, 456, 508, 509, 513, 514, 545, 546, 548, 553, 557, 558, 819-828, and 870-875 with no more than 1, 2, 3, or 4 mismatches. In some aspects, the guide strand described herein comprises a nucleic acid sequence comprising 19 consecutive sequences selected from SEQ ID NOs: 5, 7, 8, 11, 18, 20, 22, 40, 43, 44, 45, 46, 50, 52, 53, 56, 108, 109, 113, 114, 145, 146, 148, 153, 157, 158, 797-806, and 850-857 with no more than 1, 2, 3, or 4 mismatches. In some aspects, the passenger strand described herein comprises a nucleic acid sequence comprising 20 consecutive sequences selected from SEQ ID NOs: 405, 407, 408, 411, 418, 420, 422, 440, 443-446, 450, 452, 453, 456, 508, 509, 513, 514, 545, 546, 548, 553, 557, 558, 819-828, and 870-875 with no more than 1, 2, 3, or 4 mismatches. In some aspects, the guide strand described herein comprises a nucleic acid sequence comprising 20 consecutive sequences selected from SEQ ID NOs: 5, 7, 8, 11, 18, 20, 22, 40, 43, 44, 45, 46, 50, 52, 53, 56, 108, 109, 113, 114, 145, 146, 148, 153, 157, 158, 797-806, and 850-857 with no more than 1, 2, 3, or 4 mismatches. In some aspects, the passenger strand described herein comprises a nucleic acid sequence comprising 21 consecutive sequences selected from SEQ ID NOs: 405, 407, 408, 411, 418, 420, 422, 440, 443-446, 450, 452, 453, 456, 508, 509, 513, 514, 545, 546, 548, 553, 557, 558, 819-828, and 870-875 with no more than 1, 2, 3, or 4 mismatches. In some aspects, the guide strand described herein comprises a nucleic acid sequence comprising 21 consecutive sequences selected from SEQ ID NOs: 5, 7, 8, 11, 18, 20, 22, 40, 43, 44, 45, 46, 50, 52, 53, 56, 108, 109, 113, 114, 145, 146, 148, 153, 157, 158, 797-806, and 850-857 with no more than 1, 2, 3, or 4 mismatches. In some aspects, the passenger strand described herein comprises a nucleic acid sequence comprising 22 consecutive sequences selected from SEQ ID NOs: 405, 407, 408, 411, 418, 420, 422, 440, 443-446, 450, 452, 453, 456, 508, 509, 513, 514, 545, 546, 548, 553, 557, 558, 819-828, and 870-875 with no more than 1, 2, 3, or 4 mismatches. In some aspects, the guide strand described herein comprises a nucleic acid sequence comprising 22 consecutive sequences selected from SEQ ID NOs: 5, 7, 8, 11, 18, 20, 22, 40, 43, 44, 45, 46, 50, 52, 53, 56, 108, 109, 113, 114, 145, 146, 148, 153, 157, 158, 797-806, and 850-857 with no more than 1, 2, 3, or 4 mismatches.

[0073] In some aspects, the passenger strand described herein comprises a nucleic acid sequence comprising 15 consecutive sequences selected from SEQ ID NOs: 513, 546, 553, 558, 508, 514, and 545 with no more than 1, 2, 3, or 4 mismatches. In some aspects, the guide strand described herein comprises a nucleic acid sequence comprising 15 consecutive sequences selected from SEQ ID NOs: 113, 146, 153, 158, 108, 114, and 145 with no more than 1, 2, 3, or 4 mismatches.

[0074] In some aspects, the passenger strand described herein comprises a nucleic acid sequence comprising 16 consecutive sequences selected from SEQ ID NOs: 513, 546, 553, 558, 508, 514, and 545 with no more than 1, 2, 3, or 4 mismatches. In some aspects, the guide strand described herein comprises a nucleic acid sequence comprising 16 consecutive sequences selected from SEQ ID NOs: 113, 146, 153, 158, 108, 114, and 145 with no more than 1, 2, 3, or 4 mismatches.

[0075] In some aspects, the passenger strand described herein comprises a nucleic acid sequence comprising 17 consecutive sequences selected from SEQ ID NOs: 513, 546, 553, 558, 508, 514, and 545 with no more than 1, 2, 3, or 4 mismatches. In some aspects, the guide strand described herein comprises a nucleic acid sequence comprising 17 consecutive sequences selected from SEQ ID NOs: 113, 146, 153, 158, 108, 114, and 145 with no more than 1, 2, 3, or 4 mismatches.

[0076] In some aspects, the passenger strand described herein comprises a nucleic acid sequence comprising 18 consecutive sequences selected from SEQ ID NOs: 513, 546, 553, 558, 508, 514, and 545 with no more than 1, 2, 3, or 4 mismatches. In some aspects, the guide strand described herein comprises a nucleic acid sequence comprising 18 consecutive sequences selected from SEQ ID NOs: 113, 146, 153, 158, 108, 114, and 145 with no more than 1, 2, 3, or 4 mismatches.

[0077] In some aspects, the passenger strand described herein comprises a nucleic acid sequence comprising 19 consecutive sequences selected from SEQ ID NOs: 513, 546, 553, 558, 508, 514, and 545 with no more than 1, 2, 3, or 4 mismatches. In some aspects, the guide strand described herein comprises a nucleic acid sequence comprising 19 consecutive sequences selected from SEQ ID NOs: 113, 146, 153, 158, 108, 114, and 145 with no more than 1, 2, 3, or 4 mismatches. In some aspects, the passenger strand described herein comprises a nucleic acid sequence comprising 20 consecutive sequences selected from SEQ ID NOs: 513, 546, 553, 558, 508, 514, and 545 with no more than 1, 2, 3, or 4 mismatches. In some aspects, the guide strand described herein comprises a nucleic acid sequence comprising 20 consecutive sequences selected from SEQ ID NOs: 113, 146, 153, 158, 108, 114, and 145 with no more than 1, 2, 3, or 4 mismatches. In some aspects, the passenger strand described herein comprises a nucleic acid sequence comprising 21 consecutive sequences selected from SEQ ID NOs: 513, 546, 553, 558, 508, 514, and 545 with no more than 1, 2, 3, or 4 mismatches. In some aspects, the guide strand described herein comprises a nucleic acid sequence comprising 21 consecutive sequences selected from SEQ ID NOs: 5113, 146, 153, 158, 108, 114, and 145 with no more than 1, 2, 3, or 4 mismatches. In some aspects, the passenger strand described herein comprises a nucleic acid sequence comprising 22 consecutive sequences selected from SEQ ID NOs: 513, 546, 553, 558, 508, 514, and 545 with no more than 1, 2, 3, or 4 mismatches. In some aspects, the guide strand described herein comprises a nucleic acid sequence comprising 22 consecutive sequences selected from SEQ ID NOs: 113, 146, 153, 158, 108, 114, and 145 with no more than 1, 2, 3, or 4 mismatches.

[0078] In some aspects, the polynucleic acid molecule described herein comprises a passenger strand and a guide strand of about 15-30, 16-30, 17-30, 18-30, 18-27, 18-25, 18-23, 19-23, 20-23, or 21-23 nucleotides in length. In some aspects, the polynucleic acid molecule described herein comprises a passenger strand and a guide strand of about 15, 16, 17, 18, 19, 20 nucleotides in length. In some aspects, the polynucleic acid molecule described herein comprises a passenger strand and a guide strand of about 21, 22, 23, 24, 25 nucleotides in length. In some aspects, the polynucleic acid molecule described herein comprises a passenger strand and a guide strand of about 26, 27, 28, 29, 30 nucleotides in length. In some aspects, the polynucleic acid molecule described herein comprises a passenger strand of 19 nucleotides in length, and a guide strand of about 21 nucleotides in length. In some aspects, the polynucleic acid molecule described herein comprises a passenger strand of 21 nucleotides in length, and a guide strand of about 23 nucleotides in length.

[0079] In some aspects, the passenger strand and the guide strand described herein are reverse complementary to each other and form a duplex with a 3′ overhang on the guide strand. In some aspects, the passenger strand and the guide strand described herein are reverse complementary to each other and form a duplex with a 5′ overhang on the guide strand. In some aspects, the passenger strand and the guide strand described herein are reverse complementary to each other and form a duplex with a 3′ overhang on the passenger strand. In some aspects, the passenger strand and the guide strand described herein are reverse complementary to each other and form a duplex with a 5′ overhang on the passenger strand.

### Modifications of Polynucleic Acid Molecules

[0080] In some aspects, described herein is the polynucleic acid molecule described herein with modifications. In some aspects, the modifications described herein occurs one or more different structures of the polynucleic acid molecule described herein (e.g., modifications on sugar ring(s), backbone(s), base(s)). In some aspects, the modifications described herein comprise substitutions of one or more nucleotide in the polynucleic acid molecule described herein. In some aspects, different percentages of the polynucleic acid molecule described herein comprise the modifications described herein. In some aspects, different positions of the polynucleic acid molecule described herein comprise the modifications described herein. In some aspects, the modifications described herein comprise modification patterns disclosed in WO/2018/035380, which is herein incorporated by reference in its entirety.

### Types of Modifications

[0081] In some aspects, the polynucleic acid molecule described herein comprises one or more sugar-modified nucleotide. In some aspects, the sugar-modified nucleotide is a 2′-fluoro modified nucleotide. In some instances, the 2′-fluoro modified nucleotide comprises thio-modified base containing nucleotide, e.g., 2′-fluoro-2-thiouridine-3′-phosphate (U3f). In some instances, sugar-modified nucleotide includes a modification at a 2′ hydroxyl group of the ribose moiety. In some instances, the sugar-modified nucleotide includes modification with an H, OR, R, halo, SH, SR, NH2, NHR, NR2, or CN, wherein R is an alkyl moiety. In some aspects, the sugar-modified nucleotide is a 2′-O-methyl modified nucleotide or 2′-alkoxy modified nucleotide (e.g., 2′-methoxy modified nucleotide). In some instances, 2′ hydroxyl group modification includes 2′-deoxy, 2′-deoxy-2′-fluoro, 2′-O-aminopropyl (2′-O-AP), 2′-O-dimethylaminoethyl (2′-O-DMAOE), 2′-O-dimethylaminopropyl (2′-O-DMAP), 2′-O-dimethylaminoethyloxyethyl (2′-O-DMAEOE), or 2′-O-N-methylacetamido (2′-O-NMA). In some instances, the alkyl moiety comprises a hetero substitution. In some instances, the carbon of the heterocyclic group is substituted by a nitrogen, oxygen or sulfur. In some aspects, the sugar-modified nucleotide is a 2′-amino modified nucleotide. In some aspects, the sugar-modified nucleotide is a 2′-azido modified nucleotide. In some aspects, the sugar-modified nucleotide is a 2′-deoxy modified nucleotide. In some aspects, the sugar-modified nucleotide is a 2′-O-methoxythyl (2′-MOE). In some aspects, the sugar-modified nucleotide is a locked nucleic acid (LNA). In some aspects, the sugar-modified nucleotide is an ethylene-bridged nucleic acid (ENA). In some aspects, the sugar-modified nucleotide is a (S)-constrained ethyl (cEt). In some aspects, the sugar-modified nucleotide is a tricyclo-DNA (tcDNA). In some aspects, the sugar-modified nucleotide is a 2′-NH2 nucleic acid. In some aspects, the polynucleic acid molecule described herein comprises a 5′-vinylphosphonate modified nucleotide. In some instances, the 5′-vinylphosphonate modified nucleotide is located at the guide strand of the double stranded polynucleic acid molecule (e.g., siRNA). In some instances, the 5′-vinylphosphonate modified nucleotide is located at the 5′ end of the guide strand. In some instances, the 5′-vinylphosphonate modified nucleotide is located at position 1 from the 5′ end of the guide strand.

[0082] In some aspects, the polynucleic acid molecule described herein comprises one or more sugarphosphate-modified nucleotide. In some aspects, the modified sugarphosphate is phosphorodiamidate morpholino (PMO). In some aspects, the modified sugarphosphate is phosphoramidate. In some instances, the heterocyclic substitution includes imidazole, and pyrrolidino. In some aspects, the modified sugarphosphate is thiophosphoramidate. In some aspects, the modified sugarphosphate is peptide nucleic acid (PNA).

[0083] In some aspects, the polynucleic acid molecule described herein comprises one or more backbone-modified nucleotide. In some aspects, the modified backbone is a methylphosphonate. In some aspects, the modified backbone is phosphorothioate. In some aspects, the modified backbone is a guanidinopropyl phosphoramidate. In some aspects, the modified backbone is a mesyl-phosphoramidate (MsPA) linkages. In some instances, the modified backbone comprises one or more of phosphorodithioates, methylphosphonates, 5′-alkylenephosphonates, 5′-methylphosphonate, 3′-alkylene phosphonates, borontrifluoridates, borano phosphate esters and selenophosphates of 3′-5′ linkage or 2′-5′ linkage, phosphotriesters, thionoalkylphosphotriesters, hydrogen phosphonate linkages, alkyl phosphonates, alkylphosphonothioates, arylphosphonothioates, phosphoroselenoates, phosphoramidates.

[0084] In some aspects, the modified nucleotide comprises a modified guanine (e.g., inosine) or one or more of any types of unnatural nucleic acids.

[0085] In some aspects, the modified backbone comprises a phosphorothioate intemucleotide linkage, and the phosphorothioate is a stereochemically enriched phosphorothioate. In certain aspects, the strand contains at least one stereochemically enriched phosphorothioate. In some aspects, the strand comprises at least 1, 2, 3 stereochemically enriched phosphorothioates. In some aspects, the strand comprises only 1, 2, 3, or 4 stereochemically enriched phosphorothioates. In further aspects, at least one (e.g., one or two) stereochemically enriched phosphorothioate is disposed between two consecutive nucleosides that are two of six 5′ end nucleosides of the strand. In yet further aspects, at least one (e.g., one or two) stereochemically enriched phosphorothioate is disposed between two consecutive nucleosides that are two of six 3′ end nucleosides of the strand. In still further aspects, one stereochemically enriched phosphorothioate is covalently bonded to the first nucleoside and the second nucleoside from the 5′ end within the strand. In some aspects, one stereochemically enriched phosphorothioate is covalently bonded to the twenty first nucleoside and the twenty second nucleoside from the 5′ end within the strand. In certain aspects, one stereochemically enriched phosphorothioate is covalently bonded to the twenty second nucleoside and the twenty third nucleoside from the 5′ end within the strand. In particular aspects, the stereochemically enriched phosphorothioate has R_{P} stereochemical identity. In certain aspects, the stereochemically enriched phosphorothioate has S_{P} stereochemical identity.

[0086] In some aspects, the polynucleic acid molecules described herein comprises one or more (e.g., from 1 to 20, from 1 to 10, or from 1 to 5) stereochemically enriched (e.g., internucleoside) phosphorothioates (e.g., having diastereomeric excess of at least 10%, at least 50%, at least 60%, at least 70%, at least 80%, or at least 90%, e.g., up to about 99%, for the P-stereogenic center). The polynucleic acid molecules described herein comprises one or more (e.g., from 1 to 20, from 1 to 10, or from 1 to 5; e.g., intemucleoside) phosphorodithioates. The phosphorodithioates may be non-P-stereogenic in the polynucleic acid molecules described herein. Phosphorothioates and phosphorodithioates may enhance the stability of the polynucleic acid molecules described herein to exonuclease activity of serum. Non-P-stereogenic phosphorodithioates may simplify the synthesis of the polynucleic acid molecule described herein by reducing the number of possible diastereomers. Typically, the phosphorothioate or phosphorodithioate may connect two contiguous nucleosides within the six 3′ end nucleosides and the six 5′ end nucleosides of the polynucleic acid molecules described herein. In some aspects, the stereochemically enriched phosphorothioate (e.g., R_{P}-enriched phosphorothioate) may be covalently bonded to the first nucleoside (e.g., the 3′-carbon atom of the first nucleoside) and the second nucleoside (e.g., the 5′-carbon atom of the second nucleoside) from the 5′ end of the guide strand. Additionally or alternatively, the stereochemically enriched phosphorothioate (e.g., S_{P}-enriched phosphorothioate) may be covalently bonded to the 21^{st} nucleoside (e.g., the 3′-carbon atom of the 21^{st} nucleoside) from the 5′ end and the 22^{nd} nucleoside (e.g., the 5′-carbon atom of the 22^{nd} nucleoside) of the guide strand. Further, additionally or alternatively, the stereochemically enriched phosphorothioate (e.g., S_{P}-enriched phosphorothioate or R_{P}-enriched phosphorothioate) may be covalently bonded to the 22^{nd} nucleoside (e.g., the 3′-carbon atom of the 22^{nd} nucleoside) and the 23^{rd} nucleoside (e.g., the 5′-carbon atom of the 23^{rd} nucleoside) from the 5′ end of the guide strand.

[0087] Combinations of a 5′ R_{P}-enriched phosphorothioate (e.g., R_{P}-enriched phosphorothioate covalently bonded to the first nucleoside (e.g., the 3′-carbon atom of the first nucleoside) and the second nucleoside (e.g., the 5′-carbon atom of the second nucleoside) from the 5′ end and a 3′ S_{P}-enriched phosphorothioate (e.g., S_{P}-enriched phosphorothioate covalently bonded to the 21^{st} nucleoside (e.g., the 3′-carbon atom of the 21^{st} nucleoside) and the 22^{nd} nucleoside (e.g., the 5′-carbon atom of the 22^{nd} nucleoside) from the 5′ end in a guide strand can produce superior efficacy and/or duration of action, e.g., as measured by the reduction in the activity of the target relative to a reference guide strand that lacks the combination of a 5′ R_{P}-enriched phosphorothioate and a 3′ S_{P}-enriched phosphorothioate, or a 5′ Rp-enriched phosphorothioate and a 3′ Sₚ and Rₚ-enriched phosphorothioate. In some embodiments, the stereochemically enriched phosphorothioate may comprise RₚRₚSₚSₚ (RₚRₚ at the positions 1 and 2 of the guide strand and SₚSₚ at the positions 21 and 22 of the guide strand) or RₚRₚSₚRₚ (RₚRₚ at the positions 1 and 2 of the guide strand and SₚRₚ at the positions 21 and 22 of the guide strand). In some aspects, the polynucleic acid molecules described herein comprises four stereochemically enriched phosphorothioates: (1) a Rp-enriched phosphorothioate covalently bonded to the 1^{st} nucleoside (e.g., the 3′-carbon atom of the 1^{st} nucleoside) and the 2^{nd} nucleoside (e.g., the 5′-carbon atom of the 2^{nd} nucleoside) from the 5′-end of the guide strand; (2) a Rp-enriched phosphorothioate covalently bonded to the 2^{nd} nucleoside (e.g., the 3′-carbon atom of the 2^{nd} nucleoside) and the 3^{rd} nucleoside (e.g., the 5′-carbon atom of the 3^{rd} nucleoside) from the 5′-end of the guide strand; (3) a Sp-enriched phosphorothioate covalently bonded to the 21^{st} nucleoside (e.g., the 3′-carbon atom of the 21^{st} nucleoside) and the 22^{th} nucleoside (e.g., the 5′-carbon atom of the 22^{th} nucleoside) from the 5′-end of the guide strand; and (4) a Sp-enriched phosphorothioate covalently bonded to the 22^{th} nucleoside (e.g., the 3′-carbon atom of the 22^{th} nucleoside) and the 23^{rd} nucleoside (e.g., the 5′-carbon atom of the 23^{rd} nucleoside) from the 5′-end of the guide strand. In some aspects, the polynucleic acid molecules described herein comprises four stereochemically enriched phosphorothioates: (1) a Rp-enriched phosphorothioate covalently bonded to the 1^{st} nucleoside (e.g., the 3′-carbon atom of the 1^{st} nucleoside) and the 2^{nd} nucleoside (e.g., the 5′-carbon atom of the 2^{nd} nucleoside) from the 5′-end of the guide strand; (2) a Rp-enriched phosphorothioate covalently bonded to the 2^{nd} nucleoside (e.g., the 3′-carbon atom of the 2^{nd} nucleoside) and the 3^{rd} nucleoside (e.g., the 5′-carbon atom of the 3^{rd} nucleoside) from the 5′-end of the guide strand; (3) a Sp-enriched phosphorothioate covalently bonded to the 21^{st} nucleoside (e.g., the 3′-carbon atom of the 21^{st} nucleoside) and the 22^{th} nucleoside (e.g., the 5′-carbon atom of the 22^{th} nucleoside) from the 5′-end of the guide strand; and (4) a Rp-enriched phosphorothioate covalently bonded to the 22^{th} nucleoside (e.g., the 3′-carbon atom of the 22^{th} nucleoside) and the 23^{rd} nucleoside (e.g., the 5′-carbon atom of the 23^{rd} nucleoside) from the 5′-end of the guide strand.

[0088] In some aspects, the polynucleic acid molecule described herein comprises one or more purine modification. In some aspects, the purine modification described herein is 2,6-diaminopurine. In some aspects, the purine modification described herein is 3-deaza-adenine. In some aspects, the purine modification described herein is 7-deaza-guanine. In some aspects, the purine modification described herein is 8-azido-adenine.

[0089] In some aspects, the polynucleic acid molecule described herein comprises one or more pyrimidine modification. In some aspects, the pyrimidine modification described herein is 2-thio-thymidine. In some aspects, the pyrimidine modification described herein is 5-carboxamide-uracil. In some aspects, the pyrimidine modification described herein is 5-methyl-cytosine. In some aspects, the pyrimidine modification described herein is 5-ethynyl uracil.

[0090] In some embodiment, the polynucleic acid molecule described herein comprises an abasic substitution. In those cases where a hybridized polynucleotide construct is contemplated for use as siRNA, a reduction of miRNA-like off-target effects is desirable. The inclusion of one or more (e.g., one or two) abasic substitutions in the hybridized polynucleotide constructs may reduce or even eliminate miRNA-like off-target effects, as the abasic substitutions lack nucleobases that are capable of engaging in base-pairing interactions and alleviate steric hindrance. Thus, the polynucleic acid molecule disclosed herein may include one or more (e.g., one or two) abasic substitutions. In some aspects, abasic substitution is at the 5^{th} nucleotide from the 5′ end of the guide strand described herein. In some aspects, abasic substitution is at the 7^{th} nucleotide from the 5′ end of the guide strand described herein.

[0091] When the polynucleic acid molecule disclosed herein includes two or more of the abasic substitutions, their structures may be same or different. In certain aspects, a passenger strand contains one abasic substitution (e.g., a guide strand may be free of abasic substitutions). In other aspects, a guide strand contains one abasic substitution (e.g., a passenger strand may be free of abasic substitutions). In yet other aspects, a guide strand contains one abasic substitution, and a passenger strand contains one abasic substitution. In further aspects, a passenger strand comprises an abasic substitution between a nucleoside number (x) and a nucleoside number (x+1), where x is an integer from 2 to 7. In yet further aspects, a guide strand includes an abasic substitution between a nucleoside number (x) and a nucleoside number (x+1), where x is an integer from 2 to 7.

[0092] The abasic substitution may be of formula (III):

[chemical structure]

[0093] where
[0094] L is a sugar analogue, or is substituted with a heteroacyl from A, U, C, G, or is any other substituted nucleic acid (e.g., locked or unlocked nucleic acid, glycol nucleic acid, etc.);
[0095] each X⁴ is independently O or S;
[0096] each X⁵ is independently O, S, NH, or a bond;
[0097] each R⁹ is independently H, optionally substituted C₁₋₆ alkyl, optionally substituted C₂₋₆ alkenyl, optionally substituted C₂₋₆ alkynyl, optionally substituted (C₁₋₉ heterocyclyl)-C₁₋₆-alkyl, optionally substituted (C₆₋₁₀ aryl)-C₁₋₆-alkyl, optionally substituted (C₃₋₈ cycloalkyl)-C₁₋₆-alkyl, -LinkA(−T)ₚ, or a conjugation moiety;
[0098] each LinkA is independently a multivalent linker (e.g., including —C(O)—N(H)—);
[0099] each T is independently an auxiliary moiety;
[0100] R¹⁰ is a bond to a 3′-carbon atom of a nucleoside (x) in the strand;
[0101] R¹¹ is a bond to a 5′-oxygen atom of a nucleoside (x+1) in the strand;
[0102] p is an integer from 1 to 6; and t is an integer from 1 to 6.

[0103] In some aspects, the abasic substitution described herein is attached to the guide strand of the polynucleic acid molecule described herein. In particular aspects, an abasic substitution (e.g., an intemucleotide, abasic spacer of formula (III) in which t is 1) may be included in the guide strand described herein (e.g., within the seed region of the guide strand). In some aspects, an abasic substitution (e.g., an intemucleotide, abasic spacer of formula (III) in which t is 1) may be bonded to the 3′ carbon atom of the second, third, fourth, or fifth nucleoside from the 5′ end of the guide strand described herein. In certain aspects, an abasic substitution (e.g., an intemucleotide, abasic spacer of formula (III) in which t is 1) may be bonded to the 3′ carbon atom of the thirteenth, fourteenth, fifteenth, or sixteenth nucleoside from the 5′ end of the guide strand described herein. In some aspects, an abasic substitution fourth, fifth, sixth, seventh, eighth, and/or ninth nucleoside from the 5′ end of the guide strand described herein.

[0104] The polynucleic acid molecule described herein may contain a strand including a seed region including a hypoxanthine nucleobase-containing nucleoside (e.g., inosine).

[0105] In certain aspects, the hypoxanthine nucleobase-containing nucleoside is a second nucleoside from the 5′ end in the strand. In further aspects, the hypoxanthine nucleobase-containing nucleoside is a third nucleoside from the 5′ end in the strand. In yet further aspects, the hypoxanthine nucleobase-containing nucleoside is a fourth nucleoside from the 5′ end in the strand. In still further aspects, the hypoxanthine nucleobase-containing nucleoside is a fifth nucleoside from the 5′ end in the strand. In particular aspects, the hypoxanthine nucleobase-containing nucleoside is a sixth nucleoside in the strand. In particular aspects, the hypoxanthine nucleobase-containing nucleoside is a seventh nucleoside in the strand.

### Nucleotide Analogue

[0106] In some aspects, the present disclosure provides a polynucleic acid molecule incorporating a nucleotide analogue.

[0107] In some instances, modifications of the nucleotide with the nucleotide analogue described herein can alter base pairings and structural changes of the inhibitiory polynucleic acid molecule. In some intances, the nucleotide analogue can be incorporated into the polynucleic acid molecule, thereby suppressing off-target effects. In some instances, the nucleotide analogue can be incorporated into the polynucleic acid molecule, thereby improving stability and efficacy of the polynucleic acid molecule. In some instances, the nucleotide analogue described herein can be incorporated into a guide strand, a passenger strand, or a combination thereof.

[0108] In some intances, the nucleotide analogue can be placed in the polynucleic acid molecule or be a substitute for a nucleotide in the polynucleic acid molecule, thereby suppressing the off-target effects. In some instances, the nucleotide analogue can be substituted for a nucleotide in the polynucleic acid molecule, thereby improving stability and/or efficacy of the polynucleic acid molecule. In some instances, the nucleotide analogue described herein can be placed in a guide strand, a passenger strand, or both.

[0109] In some aspects, the present disclosure provides a polynucleic acid molecule comprising a passenger strand (sense strand) and a guide strand (antisense strand), wherein the guide strand comprises a nucleotide analogue as described herein. In some instances, the nucleotide analogue comprises acyclic L-threoninol nucleic acid-thymine-3′-phosphate (T-T), acyclic L-threoninol nucleic acid-adenine-3′-phosphate (T-A), acyclic N-acetyl L-threoninol abasic nucleic acid-3′phosphate (T-NAc), 1′,2′-Dideoxyribose-3′-phosphate (dAB), thymidine-glycol nucleic acid (GNA)S-isomer (Tgn), 2′-O-methyl-2-thiouridine-3′-phosphate (u3), 2′-fluoro-2-thiouridine-3′-phosphate (U3f), or 2-amino-2′-O-methyladenosine-3′-phosphate (al). In some instance, the nucleotide analogue is selected from a group consisting of the nucleotide analogue selected from acyclic L-threoninol nucleic acid-thymine-3′-phosphate (T-T), acyclic L-threoninol nucleic acid-adenine-3′-phosphate (T-A), acyclic N-acetyl L-threoninol abasic nucleic acid-3′phosphate (T-NAc), 1′,2′-Dideoxyribose-3′-phosphate (dAB), thymidine-glycol nucleic acid (GNA)S-isomer (Tgn), 2′-O-methyl-2-thiouridine-3′-phosphate (u3), 2′-fluoro-2-thiouridine-3′-phosphate (U3), and 2-amino-2′-O-methyladenosine-3′-phosphate (al). In some instances, the nucleotide analogue is selected from a group consisting of the nucleotide analogue selected from acyclic L-threoninol nucleic acid-thymine-3′-phosphate (T-T), acyclic L-threoninol nucleic acid-adenine-3′-phosphate (T-A), acyclic N-acetyl L-threoninol abasic nucleic acid-3′phosphate (T-NAc), 1′,2′-Dideoxyribose-3′-phosphate (dAB), thymidine-glycol nucleic acid (GNA)S-isomer (Tgn), 2′-O-methyl-2-thiouridine-3′-phosphate (u3), and 2′-fluoro-2-thiouridine-3′-phosphate (U3).

[0110] In some instances, the acyclic L-threoninol nucleic acid-3′-phosphate (T-T) has a generic representation shown as below, where the base can be any suitable base or modified base that can make Watson-Crick binding with the base on the opposite strand:

[chemical structure]

[0111] In some instances, the amidite structure of acyclic L-threoninol nucleic acid-thymine-3′-phosphate (T-T) is shown as below:

[chemical structure]

[0112] In some instances, the acyclic L-threoninol nucleic acid-thymine-3′-phosphate (T-T) is incorporated into the polynucleic acid molecule. In some instances, the acyclic L-threoninol nucleic acid-thymine-3′-phosphate (T-T) is incorporated into the siRNA. In some instances, the acyclic L-threoninol nucleic acid-thymine-3′-phosphate (T-T) is incorporated into a guide strand. In some instances, the acyclic L-threoninol nucleic acid-thymine-3′-phosphate (T-T) is incorporated into a passenger strand. In some instances, an incorporated acyclic L-threoninol nucleic acid-thymine-3′-phosphate (T-T) has structure shown as below:

[chemical structure]

[0113] In some instances, the acyclic L-threoninol nucleic acid-thymine-3′-phosphate (T-T) is placed in the polynucleic acid molecule. In some instances, the acyclic L-threoninol nucleic acid-thymine-3′-phosphate (T-T) substitutes one or more nucleotide in siRNA. In some instances, the acyclic L-threoninol nucleic acid-thymine-3′-phosphate (T-T) substitutes one or more nucleotide in a passenger strand and/or a guide strand. In some instances, the acyclic L-threoninol nucleic acid-thymine-3′-phosphate (T-T) substitutes one or more nucleotide in a passenger strand. In some instances, the acyclic L-threoninol nucleic acid-thymine-3′-phosphate (T-T) substitutes one or more nucleotide in a guide strand.

[0114] In some instances, the amidite structure of acyclic L-threoninol nucleic acid-adenine-3′-phosphate (T-A) is shown as below:

[chemical structure]

[0115] In some instances, the acyclic L-threoninol nucleic acid-adenine-3′-phosphate (T-A) is incorporated into the polynucleic acid molecule. In some instances, the acyclic L-threoninol nucleic acid-adenine-3′-phosphate (T-A) is incorporated into the siRNA. In some instances, the acyclic L-threoninol nucleic acid-adenine-3′-phosphate (T-A)is incorporated into a guide strand. In some instances, the acyclic L-threoninol nucleic acid-adenine-3′-phosphate (T-A) is incorporated into a passenger strand. In some instances, an incorporated acyclic L-threoninol nucleic acid-adenine-3′-phosphate (T-A) has structure shown as below:

[chemical structure]

[0116] In some instances, the acyclic L-threoninol nucleic acid-adenine-3′-phosphate (T-A) is placed in the polynucleic acid molecule. In some instances, the acyclic L-threoninol nucleic acid-adenine-3′-phosphate (T-A) substitutes one or more nucleotide in siRNA. In some instances, the acyclic L-threoninol nucleic acid-adenine-3′-phosphate (T-A) substitutes one or more nucleotide in a passenger strand and/or a guide strand. In some instances, the acyclic L-threoninol nucleic acid-adenine-3′-phosphate (T-A) substitutes one or more nucleotide in a passenger strand. In some instances, the acyclic L-threoninol nucleic acid-adenine-3′-phosphate (T-A) substitutes one or more the nucleotide in a guide strand.

[0117] In some instances, the amidite structure of acyclic N-Acetyl L-threoninol abasic nucleic acid-3′-phosphate (T-NAc) is shown as below:

[chemical structure]

[0118] In some instances, the acyclic N-Acetyl L-threoninol abasic nucleic acid-3′-phosphate (T-NAc) is incorporated into the polynucleic acid molecule. In some instances, the acyclic N-Acetyl L-threoninol abasic nucleic acid-3′-phosphate (T-NAc) is incorporated into the siRNA. In some instances, the acyclic N-Acetyl L-threoninol abasic nucleic acid-3′-phosphate (T-NAc) is incorporated into a guide strand. In some instances, the acyclic N-Acetyl L-threoninol abasic nucleic acid-3′-phosphate (T-NAc) is incorporated into a passenger strand. In some instances, an incorporated acyclic N-Acetyl L-threoninol abasic nucleic acid-3′-phosphate (T-NAc) has structure shown as below:

[chemical structure]

[0119] In some instances, the acyclic N-Acetyl L-threoninol abasic nucleic acid-3′-phosphate (T-NAc) is placed in the polynucleic acid molecule. In some instances, the acyclic N-Acetyl L-threoninol abasic nucleic acid-3′-phosphate (T-NAc) substitutes one or more nucleotide in siRNA. In some instances, the acyclic N-Acetyl L-threoninol abasic nucleic acid-3′-phosphate (T-NAc) substitutes one or more nucleotide in a passenger strand and/or a guide strand. In some instances, acyclic N-Acetyl L-threoninol abasic nucleic acid-3′-phosphate (T-NAc) substitutes one or more nucleotide in a passenger strand. In some instances, the acyclic N-Acetyl L-threoninol abasic nucleic acid-3′-phosphate (T-NAc) substitutes one or more nucleotide in a guide strand.

[0120] In some instances, the amidite structure of 1′,2′-Dideoxyribose-3′-phosphate (dAB) is shown as below:

[chemical structure]

[0121] In some instances, the 1′,2′-Dideoxyribose-3′-phosphate (dAB) is incorporated into the polynucleic acid molecule. In some instances, the 1′,2′-Dideoxyribose-3′-phosphate (dAB) is incorporated into the siRNA. In some instances, the 1′,2′-Dideoxyribose-3′-phosphate (dAB) is incorporated into a guide strand. In some instances, the 1′,2′-Dideoxyribose-3′-phosphate (dAB) is incorporated into a passenger strand. In some instances, an incorporated 1′,2′-Dideoxyribose-3′-phosphate (dAB) has structure shown as below:

[chemical structure]

[0122] In some instances, the 1′,2′-Dideoxyribose-3′-phosphate (dAB) is placed in the polynucleic acid molecule. In some instances, the 1′,2′-Dideoxyribose-3′-phosphate (dAB) substitutes one or more nucleotide in siRNA. In some instances, the 1′,2′-Dideoxyribose-3′-phosphate (dAB) substitutes one or more nucleotide in a passenger strand and/or a guide strand. In some instances, the 1′,2′-Dideoxyribose-3′-phosphate (dAB) substitutes one or more nucleotide in a passenger strand. In some instances, the 1′,2′-Dideoxyribose-3′-phosphate (dAB) substitutes one or more nucleotide in a guide strand.

[0123] In some instances, the amidite structure of thymidine-glycol nucleic acid (GNA)S-isomer (Tgn) is shown as below:

[chemical structure]

[0124] In some instances, the thymidine-glycol nucleic acid (GNA)S-isomer (Tgn) is incorporated into the polynucleic acid molecule. In some instances, the thymidine-glycol nucleic acid (GNA)S-isomer (Tgn) is incorporated into the siRNA. In some instances, the thymidine-glycol nucleic acid (GNA)S-isomer (Tgn) is incorporated into a guide strand. In some instances, the thymidine-glycol nucleic acid (GNA)S-isomer (Tgn) is incorporated into a passenger strand. In some instances, an incorporated thymidine-glycol nucleic acid (GNA)S-isomer (Tgn) has structure shown as below:

[chemical structure]

[0125] In some instances, the thymidine-glycol nucleic acid (GNA)S-isomer (Tgn) is placed in the polynucleic acid molecule. In some instances, the thymidine-glycol nucleic acid (GNA)S-isomer (Tgn) substitutes one or more nucleotide in siRNA. In some instances, the thymidine-glycol nucleic acid (GNA)S-isomer (Tgn) substitutes one or more nucleotide in a passenger strand and/or a guide strand. In some instances, the thymidine-glycol nucleic acid (GNA)S-isomer (Tgn) substitutes one or more nucleotide in a passenger strand. In some instances, the thymidine-glycol nucleic acid (GNA)S-isomer (Tgn) substitutes one or more nucleotide in a guide strand.

[0126] In some instances, the amidite structure of 2′-O-methyl-2-thiouridine-3′-phosphate (u3) is shown as below:

[chemical structure]

[0127] In some instances, the 2′-O-methyl-2-thiouridine-3′-phosphate (u3) is incorporated into the polynucleic acid molecule. In some instances, the 2′-O-methyl-2-thiouridine-3′-phosphate (u3) is incorporated into the siRNA. In some instances, the 2′-O-methyl-2-thiouridine-3′-phosphate (u3) is incorporated into a guide strand. In some instances, the 2′-O-methyl-2-thiouridine-3′-phosphate (u3) is incorporated into a passenger strand. In some instances, an incorporated 2′-O-methyl-2-thiouridine-3′-phosphate (u3) has structure shown as below:

[chemical structure]

[0128] In some instances, the 2′-O-methyl-2-thiouridine-3′-phosphate (u3) is placed in the polynucleic acid molecule. In some instances, the 2′-O-methyl-2-thiouridine-3′-phosphate (u3) substitutes one or more nucleotide in siRNA. In some instances, the 2′-O-methyl-2-thiouridine-3′-phosphate (u3) substitutes one or more nucleotide in a passenger strand and/or a guide strand. In some instances, the 2′-O-methyl-2-thiouridine-3′-phosphate (u3) substitutes one or more nucleotide in a passenger strand. In some instances, the 2′-O-methyl-2-thiouridine-3′-phosphate (u3) substitutes one or more nucleotide in a guide strand.

[0129] In some instances, the amidite structure of 2′-fluoro-2-thiouridine-3′-phosphate (U3) is shown as below:

[chemical structure]

[0130] In some instances, the 2′-fluoro-2-thiouridine-3′-phosphate (U3) is incorporated into the polynucleic acid molecule. In some instances, the 2′-fluoro-2-thiouridine-3′-phosphate (U3f) is incorporated into the siRNA. In some instances, the 2′-fluoro-2-thiouridine-3′-phosphate (U3f) is incorporated into a guide strand. In some instances, the 2′-fluoro-2-thiouridine-3′-phosphate (U3f) is incorporated into a passenger strand. In some instances, an incorporated 2′-fluoro-2-thiouridine-3′-phosphate (U3f) has structure shown as below:

[chemical structure]

[0131] In some instances, the 2′-fluoro-2-thiouridine-3′-phosphate (U3f) is placed in the polynucleic acid molecule. In some instances, the 2′-fluoro-2-thiouridine-3′-phosphate (U3f) substitutes one or more nucleotide in siRNA. In some instances, the 2′-fluoro-2-thiouridine-3′-phosphate (U3) substitutes one or more nucleotide in a passenger strand and/or a guide strand. In some instances, the 2′-fluoro-2-thiouridine-3′-phosphate (U3) substitutes one or more the nucleotide in a passenger strand. In some instances, the 2′-fluoro-2-thiouridine-3′-phosphate (U3f) substitutes one or more the nucleotide in a guide strand.

[0132] In some instances, the amidite structure of 2-amino-2′-O-methyladenosine-3′-phosphate (al) is shown as below:

[chemical structure]

[0133] In some instances, the 2-amino-2′-O-methyladenosine-3′-phosphate (al) is incorporated into the polynucleic acid molecule. In some instances, the 2-amino-2′-O-methyladenosine-3′-phosphate (al) is incorporated into the siRNA. In some instances, the 2-amino-2′-O-methyladenosine-3′-phosphate (al) is incorporated into a guide strand. In some instances, the 2-amino-2′-O-methyladenosine-3′-phosphate (al) is incorporated into a passenger strand. In some instances, an incorporated 2-amino-2′-O-methyladenosine-3′-phosphate (al) has structure shown as below:

[chemical structure]

[0134] In some instances, the 2-amino-2′-O-methyladenosine-3′-phosphate (al) is placed in the polynucleic acid molecule. In some instances, the 2-amino-2′-O-methyladenosine-3′-phosphate (al) substitutes one or more nucleotide in siRNA. In some instances, the 2-amino-2′-O-methyladenosine-3′-phosphate (al) substitutes one or more nucleotide in a passenger strand and/or a guide strand. In some instances, the 2-amino-2′-O-methyladenosine-3′-phosphate (al) substitutes one or more nucleotide in a passenger strand. In some instances, the 2-amino-2′-O-methyladenosine-3′-phosphate (al) substitutes one or more nucleotide in a guide strand.

[0135] In some instances, the nucleotide analogue comprises hypoxanthine nucleobase-containing nucleoside (e.g., inosine).

### The Amount and Location of Modifications

[0136] In some aspects, the polynucleic acid molecule described herein comprises one or more type of modifications as described above. Accordingly, in some aspects, about 10% of the nucleotides from the polynucleic acid molecule described herein are modified with one or more type of modifications as described above. In other aspects, about 20% of the nucleotides from the polynucleic acid molecule described herein are modified with one or more type of modifications as described above. In other aspects, about 30% of the nucleotides from the polynucleic acid molecule described herein are modified with one or more type of modifications as described above. In other aspects, about 40% of the nucleotides from the polynucleic acid molecule described herein are modified with one or more type of modifications as described above. In other aspects, about 50% of the nucleotides from the polynucleic acid molecule described herein are modified with one or more type of modifications as described above. In other aspects, about 60% of the nucleotides from the polynucleic acid molecule described herein are modified with one or more type of modifications as described above. In other aspects, about 70% of the nucleotides from the polynucleic acid molecule described herein are modified with one or more type of modifications as described above. In other aspects, about 80% of the nucleotides from the polynucleic acid molecule described herein are modified with one or more type of modifications as described above. In other aspects, about 90% of the nucleotides from the polynucleic acid molecule described herein are modified with one or more type of modifications as described above. In other aspects, 100% of the nucleotides from the polynucleic acid molecule described herein are modified with one or more type of modifications as described above.

[0137] In some aspects, the one or more types of modifications described herein occurs at different positions within the polynucleic acid molecule described herein. In some aspects, the one or more types of modifications described herein occurs in the seed region within the polynucleic acid molecule described herein. In some aspects, the one or more types of modifications described herein occurs at 3′ end of the polynucleic acid molecule described herein. In some aspects, the one or more types of modifications described herein occurs at 5′ end of the polynucleic acid molecule described herein. In some aspects, the one or more types of modifications described herein occurs dispersedly within the polynucleic acid molecule described herein. In some aspects, the one or more types of modifications described herein occurs in clusters within the polynucleic acid molecule described herein.

[0138] In some aspects, the polynucleic acid molecule is modified with a nucleotide analogue described herein by incorporating the nucleotide analogue in a seed region of the guide strand (positions 2-8 from 5′ end of the guide strand). As described herein, “seed region” refers to a region on the polynucleic acid molecule that comprises sequence that is essential for the binding of the polynucleic acid molecule described herein to the target RNA, e.g., mRNA.

[0139] In some instances, the polynucleic acid molecule is modified with a nucleotide analogue described herein at positions 3-8, positions 4-8, positions 5-8, positions 6-8, or positions 7-8 from the 5′ end of the guide strand. In some instances, the polynucleic acid molecule is modified with a nucleotide analogue described herein at position 2, position 3, position 4, position 5, position 6, position 7, position 8, from the 5′ end of the guide strand or combination thereof. In some instances, the polynucleic acid molecule is modified with one, two, three, four, five, six, or seven nucleotide analogues. In some instances, two or more consecutive positions in the guide strand of the polynucleic acid molecule are modified with nucleotide analogues. In some instances, two or more nucleotide analogue modifications can be placed in the polynucleic acid molecule at alternative positions (e.g., positions 3 and 5, positions 4 and 6, positions 5 and 7, etc.).

[0140] In some instances, the polynucleic acid molecule comprises a polynucleic acid molecule. In some instances, the polynucleic acid molecule is an siRNA comprising a guide strand and a passenger strand. In some instances, the nucleotide analogue is located at the seed region of the guide strand at positions 2-8 from the 5′ end. In some instances, the nucleotide analogue is located at at positions 3-8 from the 5′ end. In some instances, the nucleotide analogue is located at positions 4-8 from the 5′ end. In some instances, the nucleotide analogue is located at positions 5-8 from the 5′ end. In some instances, the nucleotide analogue is located at positions 6-8 from the 5′ end. the nucleotide analogue is located at positions 6-7 from the 5′ end. In some instances, the nucleotide analogue is located at positions 7-8 from the 5′ end.

[0141] In some instances, the nucleotide analogue is located at any one of positions 2-8 from the 5′ end of the guide strand. In some instances, the nucleotide analogue is located at any one of positions 3-8 from the 5′ end of the guide strand. In some instances, the nucleotide analogue is located at any one of positions 4-8 from the 5′ end of the guide strand. In some instances, the nucleotide analogue is located at any one of positions 5-8 from the 5′ end of the guide strand. In some instances, the nucleotide analogue is located at any one of positions 6-8 from the 5′ end of the guide strand. In some instances, the nucleotide analogue is located at any one of positions 6-7 from the 5′ end of the guide strand. In some instances, the nucleotide analogue is located at any one of positions 7-8 from the 5′ end of the guide strand.

[0142] In some instances, the nucleotide analogue is located at position 1 from the 5′ end of the guide strand. In some instances, the nucleotide analogue is located at position 2 from the 5′ end of the guide strand. In some instances, the nucleotide analogue is located at position 3 from the 5′ end of the guide strand. In some instances, the nucleotide analogue is located at position 4 from the 5′ end of the guide strand. In some instances, the nucleotide analogue is located at position 5 from the 5′ end of the guide strand. In some instances, the nucleotide analogue is located at position 6 from the 5′ end of the guide strand. In some instances, the nucleotide analogue is located at position 7 from the 5′ end of the guide strand. In some instances, the nucleotide analogue is located at position 8 from the 5′ end of the guide strand. In some instances, the nucleotide analogue is located at position 9 from the 5′ end of the guide strand. In some instances, the nucleotide analogue is located at position 10 from the 5′ end of the guide strand. In some instances, the nucleotide analogue is located at position 11 from the 5′ end of the guide strand. In some instances, the nucleotide analogue is located at position 12 from the 5′ end of the guide strand. In some instances, the nucleotide analogue is located at position 13 from the 5′ end of the guide strand. In some instances, the nucleotide analogue is located at position 14 from the 5′ end of the guide strand.

[0143] In some instances, the nucleotide analogue is located at position 3 from the 5′ end of the guide strand. In some instances, the nucleotide analogue is located at position 3 from the 5′ end of the guide strand, and the guide strand further comprises 2-thiouridine-3′-phosphate nucleotide. In some instances, the nucleotide analogue located at position 3 from the 5′ end of the guide strand, and the guide strand further comprises 2′-O-methyl-2-thiouridine-3′-phosphate (u3). In some instances, the nucleotide analogue is located at position 3 from the 5′ end of the guide strand, and the guide strand further comprises at least one, at least two, at least three, or at least four 2′-F modified nucleotides. In some instances, the nucleotide analogue is located at position 3 from the 5′ end of the guide strand, and the guide strand further comprises 2′-F modified nucleotides at at least one of positions 2, 7, 12, 14, and 16 from the 5′ end. In some instances, the nucleotide analogue is located at position 3 from the 5′ end of the guide strand, and the guide strand further comprises 2′-F modified nucleotides at positions 2, 7, 12, 14, and 16 from the 5′ end.

### Specific Modification Patterns

[0144] In some aspects, described herein is a specific modification pattern for the polynucleic acid molecule which is a double-stranded nucleic acid molecule comprising a passenger strand and a guide strand. In some aspects, the guide strand comprises a 2′-fluoro modified nucleotide in position 2. In some aspects, the guide strand comprises a 2′-fluoro modified nucleotide in position 14. In some aspects, the guide strand comprises 2′-fluoro modified nucleotides in positions 2 and 14. In some aspects, the guide strand comprises a 2′-fluoro modified nucleotide in position 12. In some aspects, the guide strand comprises a 2′-fluoro modified nucleotide in position 16. In other aspects, the guide strand comprises a 2′-fluoro modified nucleotide in position 6. In other aspects, the guide strand comprises a 2′-fluoro modified nucleotide in position 7. In other aspects, the guide strand comprises a 2′-fluoro modified nucleotide in position 8. In other aspects, the guide strand comprises a 2′-fluoro modified nucleotide in position 9. In other aspects, the guide strand comprises a 2′-fluoro modified nucleotide in position 4.

[0145] In some aspects, described herein is a specific modification pattern for the polynucleic acid molecule which is a double-stranded nucleic acid molecule comprising a passenger strand and a guide strand. In some aspects, the passenger strand comprises a 2′-fluoro modified nucleotide in position 9. In some aspects, the passenger strand comprises a 2′-fluoro modified nucleotide in position 11. In some aspects, the passenger strand comprises 2′-fluoro modified nucleotides in positions 9 and 11. In some aspects, the passenger strand comprises a 2′-fluoro modified nucleotide in position 7. In some aspects, the passenger strand comprises a 2′-fluoro modified nucleotide in position 10. In some aspects, the passenger strand comprises 2′-fluoro modified nucleotides in positions 9, 11, and 7. the passenger strand comprises 2′-fluoro modified nucleotides in positions 9 and 11, and 10. the passenger strand comprises 2′-fluoro modified nucleotides in positions 9 and 7. the passenger strand comprises 2′-fluoro modified nucleotides in positions 9 and 10. the passenger strand comprises 2′-fluoro modified nucleotides in positions 9, 11, 7, and 10. In other aspects, the passenger strand comprises a 2′-fluoro modified nucleotide in position 8. In other aspects, the passenger strand comprises a 2′-fluoro modified nucleotide in position 12. In other aspects, the passenger strand comprises a 2′-fluoro modified nucleotide in position 16.

[0146] In some aspects, the passenger strand and guide strand of the polynucleic acid molecule comprises any combination of two or more 2′-fluoro modified nucleotides at the positions described in the above two paragraphs.

[0147] In some aspects, the guide strand comprises 5′-nNfnnnNfnNfNfnnnnNfnNfnnnnnnn-3′. In some aspects, the guide strand comprises 5′-nNfnnnNfnnnnnnnNfnNfnnnnnnn-3′. In some aspects, the guide strand comprises 5′-nNfnnnnNfnnnnNfnNfnnnnnnnn-3′. In the modification patterns described above, “Nf” stands for a 2′-fluoro modified nucleotide, and wherein “n” stands for a 2′-O-methyl modified nucleotide.

[0148] In some aspects, the passenger strand comprises 5′-nnnnnnNfnNfnNfnnnnnnnnn-3′. In some aspects, the passenger strand comprises 5′-nnnnnnNfnNfNfNfmnnnnnnnnn-3′. In some aspects, the passenger strand comprises 5′-nnnnnnnnNfNfNfnnnnnnnnnn-3′. In the modification patterns described above, “Nf” stands for a 2′-fluoro modified nucleotide, and wherein “n” stands for a 2′-O-methyl modified nucleotide.

[0149] In some aspects, described herein is a specific modification pattern for the polynucleic acid molecule which is a double-stranded nucleic acid molecule comprising a passenger strand and a guide strand, wherein the passenger strand comprises about twelve 2′-fluoro modified nucleotides and about nine 2′-O-methyl modified nucleotides, and wherein the guide strand comprises about nine 2′-fluoro modified nucleotides and about fourteen 2′-O-methyl modified nucleotides.

[0150] In some aspects, described herein is a specific modification pattern, wherein the passenger strand is fully modified and comprises twelve 2′-fluoro modified nucleotides, nine 2′-O-methyl modified nucleotides, and wherein the guide strand is fully modified and comprises nine 2′-fluoro modified nucleotides and fourteen 2′-O-methyl modified nucleotides.

[0151] In some aspects, described herein is a specific modification pattern, wherein the passenger strand comprises 5′-NfnNfnNfnNfnNfNfNfnNfnNfnNfnNfnNf-3′, wherein the guide strand comprises 5′-nNfnNfnNfnNfnNfinnNfnNfnNfnNfnnn-3′, wherein “Nf” stands for a 2′-fluoro modified nucleotide, and wherein “n” stands for a 2′-O-methyl modified nucleotide.

[0152] In some aspects, described herein is a specific modification pattern, wherein the passenger strand comprises 5′-NfnNfnNfnNfnNfNfNfnNfnNfnNfnNfnNf-3′, wherein the guide strand comprises 5′-nNfnNfnNfnNfhNfhnnNfnNfnNfnNfnnn-3′, wherein the passenger strand and/or guide strand comprises one or more phosphorothioate linkage, wherein “Nf” stands for a 2′-fluoro modified nucleotide, and wherein “n” stands for a 2′-O-methyl modified nucleotide. In other aspects, described herein is a specific modification pattern, wherein the passenger strand comprises 5′-NfnNfnNfnNfnNfNfNfnNfnNfhNfhNfhNf-3′, wherein the guide strand comprises 5′-nNfnNfnNfnNfnNfnmNfnNfnNfnNfnnn-3′, wherein the passenger strand comprises two phosphorothioate linkages, wherein the guide comprises four phosphorothioate linkages, wherein “Nf” stands for a 2′-fluoro modified nucleotide, and wherein “n” stands for a 2′-O-methyl modified nucleotide.

[0153] In some aspects, described herein is a specific modification pattern, wherein the passenger strand comprises 5′-nsnsnnnnNfnNfNfnnnnnnnnnn-3′, wherein the guide strand comprises 5′-nsNfsnnnnNfnnnnNfnNfnNfnnnnnsnsn-3′, wherein the passenger comprises two phosphorothioate linkages, wherein “s” stands for phosphorothioate linkages, wherein “Nf” stands for a 2′-fluoro modified nucleotide, and wherein “n” stands for a 2′-O-methyl modified nucleotide.

[0154] In some aspects, described herein is a specific modification pattern, wherein the passenger strand and/or guide strand is modified as Type I in Table 6.

TABLE 6
Nucleotide Modification Patterns

| Pattern Name | Pattern |
|---|---|
| Type I for passenger strand | 5′-NfsnsNfnNfnNfnNfNfNfnNfnNfnNfnNfnNf-3′ |
| Type I for guide strand | 5′-nsNfsnNfnNfnNfnNfnnnNfnNfnNfnNfnsnsn-3′ |
| Type II for passenger strand | 5′-nsnsnnnnNfnNfNfNfnnnnnnnnnn-3′ |
| Type II for guide strand | 5′-nsNfsnnnNfnNfNfnnnnNfnNfnnnnnsnsn-3′ |
| Type III for passenger | 5′-nsnsnnnnnnNfnNfnnnnnnnnnn-3′ |
| strand | |
| Type III for guide strand | 5′-nsNfsnnnnnnnnnNfnNfnnnnnnnsnsn-3′ |
| Type IV for passenger | 5′-nsnsnnnnNfnNfnNfnnnnnnnnnn-3′ |
| strand | |
| Type IV for guide strand | 5′-nsNfsnnnnnnnnnNfnNfnNfnnnnnsnsn-3′ |
| Type V for passenger strand | 5′-nsnsnnnnNfnNfnNfnnnnnnnnnn-3′ |
| Type V for guide strand | 5′-nsNfsnnnnNfnnnnNfnNfnNfnnnnnsnsn-3′ |
| Type VI for passenger | 5′-nnnnnnNfnNfnNfnnnnnnnnnn-invdN-invdN-3′ |
| strand | |

Note:
“Nf” stands for a 2′-fluoro modified nucleotide, “n” stands for a 2′-O-methyl modified nucleotide, “s” stands for a 3′-phosphorothioate, “invdN” stands for an inverted deoxy-nucleotide.

[0155] In some aspects, the polynucleic acid molecule provided herein comprises a passenger strand from a nucleic acid sequence selected from SEQ ID NOs: 401-596, 819-828, and 870-875 and a guide strand comprises a nucleic acid sequence selected from SEQ ID NOs: 1-196, 797-806, and 850-857. In other aspects, the polynucleic acid molecule provided herein comprises a passenger strand from a nucleic acid sequence selected from SEQ ID NOs: 401-596, 819-828, and 870-875, a guide strand comprises a nucleic acid sequence selected from SEQ ID NOs: 1-196, 797-806, and 850-857, and wherein the passenger strand and/or guide strand is modified in Type I modification pattern specified in Table 6. In some aspects, the polynucleic acid molecule provided herein comprises a passenger strand from a nucleic acid sequence selected from SEQ ID NOs: 405, 407, 408, 411, 418, 420, 422, 440, 443-446, 450, 452, 453, 456, 508, 509, 513, 514, 545, 546, 548, 553, 557, 558, 819-828, and 870-875, and a guide strand comprises a nucleic acid sequence selected from SEQ ID NOs: 5, 7, 8, 11, 18, 20, 22, 40, 43, 44, 45, 46, 50, 52, 53, 56, 108, 109, 113, 114, 145, 146, 148, 153, 157, 158, 797-806, and 850-857.

[0156] In other aspects, the polynucleic acid molecule provided herein comprises a passenger strand from a nucleic acid sequence selected from SEQ ID NOs: 405, 407, 408, 411, 418, 420, 422, 440, 443-446, 450, 452, 453, 456, 508, 509, 513, 514, 545, 546, 548, 553, 557, 558, 819-828, and 870-875, a guide strand comprises a nucleic acid sequence selected from SEQ ID NOs: 5, 7, 8, 11, 18, 20, 22, 40, 43, 44, 45, 46, 50, 52, 53, 56, 108, 109, 113, 114, 145, 146, 148, 153, 157, 158, 797-806, and 850-857, and wherein the passenger strand and/or guide strand is modified in Type I modification pattern specified in Table 6.

[0157] In some aspects, the polynucleic acid molecule provided herein comprises a passenger strand from a nucleic acid sequence selected from SEQ ID NOs: 405, 407, 408, 411, 418, 420, 422, 440, 443-446, 450, 452, 453, 456, 508, 509, 513, 514, 545, 546, 548, 553, 557, 558, 819-828, and 870-875, and a guide strand comprises a nucleic acid sequence selected from SEQ ID NOs: 5, 7, 8, 11, 18, 20, 22, 40, 43, 44, 45, 46, 50, 52, 53, 56, 108, 109, 113, 114, 145, 146, 148, 153, 157, 158, 797-806, and 850-857. In other aspects, the polynucleic acid molecule provided herein comprises a passenger strand from a nucleic acid sequence selected from SEQ ID NOs: 405, 407, 408, 411, 418, 420, 422, 440, 443-446, 450, 452, 453, 456, 508, 509, 513, 514, 545, 546, 548, 553, 557, 558, 819-828, and 870-875, and a guide strand comprises a nucleic acid sequence selected from SEQ ID NOs: 5, 7, 8, 11, 18, 20, 22, 40, 43, 44, 45, 46, 50, 52, 53, 56, 108, 109, 113, 114, 145, 146, 148, 153, 157, 158, 797-806, and 850-857, and wherein the passenger strand and/or guide strand is modified in Type I modification pattern specified in Table 6.

[0158] In some aspects, the polynucleic acid molecule provided herein comprises a passenger strand from a nucleic acid sequence selected from SEQ ID NOs: 513, 546, 553, 558, 508, 514, and 545, and a guide strand comprises a nucleic acid sequence selected from SEQ ID NOs: 113, 146, 153, 158, 108, 114, and 145. In other aspects, the polynucleic acid molecule provided herein comprises a passenger strand from a nucleic acid sequence selected from SEQ ID NOs: 513, 546, 553, 558, 508, 514, and 545, and a guide strand comprises a nucleic acid sequence selected from SEQ ID NOs: 113, 146, 153, 158, 108, 114, and 145, and wherein the passenger strand and/or guide strand is modified in Type I modification pattern specified in Table 6.

[0159] In some aspects, described herein is a specific modification pattern, wherein the passenger strand comprises about four 2′-fluoro modified nucleotides and about seventeen 2′-O-methyl modified nucleotides, and wherein the guide strand comprises about six 2′-fluoro modified nucleotides and about seventeen 2′-O-methyl modified nucleotides.

[0160] In some aspects, described herein is a specific modification pattern, wherein the passenger strand is fully modified and comprises four 2′-fluoro modified nucleotides, seventeen 2′-O-methyl modified nucleotides, and wherein the guide strand is fully modified and comprises six 2′-fluoro modified nucleotides and seventeen 2′-O-methyl modified nucleotides.

[0161] In some aspects, described herein is a specific modification pattern, wherein the passenger strand comprises 5′-nnnnnnNfnNfNfNfnnnnnnnnnn-3′, wherein the guide strand comprises 5′-nNfnnnNfnNfNfnnnnNfnNfhnnnnnn-3′, wherein “Nf” stands for a 2′-fluoro modified nucleotide, and wherein “n” stands for a 2′-O-methyl modified nucleotide.

[0162] In some aspects, described herein is a specific modification pattern, wherein the passenger strand comprises 5′-nnnnnnNfnNfNfNfnnnnnnnnnn-3′, wherein the guide strand comprises 5′-nNfnnnNfnNfNfnnnnNfnNfinnnnnn-3′, wherein the passenger strand and/or guide strand comprises one or more phosphorothioate linkage, wherein “Nf” stands for a 2′-fluoro modified nucleotide, and wherein “n” stands for a 2′-O-methyl modified nucleotide. In other aspects, described herein is a specific modification pattern, wherein the passenger strand comprises 5′-nnnnnnNfnNfNfNfnnnnnnnnnn-3′, wherein the guide strand comprises 5′-nNfnnnNfnNfNfnnnnNfnNfnnnnnnn-3′, wherein the passenger strand comprises two phosphorothioate linkages, wherein the guide comprises four phosphorothioate linkages, wherein “Nf” stands for a 2′-fluoro modified nucleotide, and wherein “n” stands for a 2′-O-methyl modified nucleotide.

[0163] In some aspects, described herein is a specific modification pattern, wherein the passenger strand and/or guide strand is modified as Type II in Table 6.

[0164] In some aspects, the polynucleic acid molecule provided herein comprises a passenger strand comprising a nucleic acid sequence selected from SEQ ID NOs: 401-596, 819-828, and 870-875, and/or a guide strand comprising a nucleic acid sequence selected from SEQ ID NOs: 1-196, 797-806, and 850-857, and wherein the passenger strand and/or guide strand is modified in Type II modification pattern specified in Table 6. In other aspects, the polynucleic acid molecule provided herein comprises a passenger strand comprising a nucleic acid sequence selected from SEQ ID NOs: 405, 407, 408, 411, 418, 420, 422, 440, 443-446, 450, 452, 453, 456, 508, 509, 513, 514, 545, 546, 548, 553, 557, 558, 819-828, and 870-875, and/or a guide strand comprising a nucleic acid sequence selected from SEQ ID NOs: 5, 7, 8, 11, 18, 20, 22, 40, 43, 44, 45, 46, 50, 52, 53, 56, 108, 109, 113, 114, 145, 146, 148, 153, 157, 158, 797-806, and 850-857, and wherein the passenger strand and/or guide strand is modified in Type II modification pattern specified in Table 6. In other aspects, the polynucleic acid molecule provided herein comprises a passenger strand comprising a nucleic acid sequence selected from SEQ ID NOs: 405, 407, 408, 411, 418, 420, 422, 440, 443-446, 450, 452, 453, 456, 508, 509, 513, 514, 545, 546, 548, 553, 557, 558, 819-828, and 870-875, and/or a guide strand comprising a nucleic acid sequence selected from SEQ ID NOs: 5, 7, 8, 11, 18, 20, 22, 40, 43, 44, 45, 46, 50, 52, 53, 56, 108, 109, 113, 114, 145, 146, 148, 153, 157, 158, 797-806, and 850-857, and wherein the passenger strand and/or guide strand is modified in Type II modification pattern specified in Table 6. In other aspects, the polynucleic acid molecule provided herein comprises a passenger strand comprising a nucleic acid sequence selected from SEQ ID NOs: 405, 408, 418, 422, 440, 444-446, 450, 452-453, 456, 513, 546, 553, 509. 558, 508, 514, and 545, and/or a guide strand comprising a nucleic acid sequence selected from SEQ ID NOs: 113, 146, 153, 158, 108, 114, and 145, and wherein the passenger strand and/or guide strand is modified in Type II modification pattern specified in Table 6.

[0165] In some aspects, described herein is a specific modification pattern, wherein the passenger strand comprises about two 2′-fluoro modified nucleotides and about nineteen 2′-O-methyl modified nucleotides, and wherein the guide strand comprises about three 2′-fluoro modified nucleotides and about twenty 2′-O-methyl modified nucleotides.

[0166] In some aspects, described herein is a specific modification pattern, wherein the passenger strand is fully modified and comprises two 2′-fluoro modified nucleotides and nineteen 2′-O-methyl modified nucleotides, and wherein the guide strand is fully modified and comprises three 2′-fluoro modified nucleotides and twenty 2′-O-methyl modified nucleotides.

[0167] In some aspects, described herein is a specific modification pattern, wherein the passenger strand comprises 5′-nnnnnnnnNfnNfnnnnnnnnnn-3′, wherein the guide strand comprises 5′-nNfnnnnnnnnnNfnNfnnnnnnnnn-3′, wherein “Nf” stands for a 2′-fluoro modified nucleotide, and wherein “n” stands for a 2′-O-methyl modified nucleotide.

[0168] In some aspects, described herein is a specific modification pattern, wherein the passenger strand comprises 5′-nnnnnnnnNfnNfnnnnnnnnnn-3′, wherein the guide strand comprises 5′-nNfnnnnnnnnnNfnNfnnnnnnnnn-3′, wherein the passenger strand and/or guide strand comprises one or more phosphorothioate linkage, wherein “Nf” stands for a 2′-fluoro modified nucleotide, and wherein “n” stands for a 2′-O-methyl modified nucleotide. In other aspects, described herein is a specific modification pattern, wherein the passenger strand comprises 5′-nnnnnnnnNfnNfnnnnnnnnnn-3′, wherein the guide strand comprises 5′-nNfnnnnnnnnnNfnNfnnnnnnnnn-3′, wherein the passenger comprises two phosphorothioate linkages, wherein the guide comprises four phosphorothioate linkages, wherein “Nf” stands for a 2′-fluoro modified nucleotide, and wherein “n” stands for a 2′-O-methyl modified nucleotide.

[0169] In some aspects, described herein is a specific modification pattern, wherein the passenger strand and/or guide strand is modified as Type III in Table 6.

[0170] In some aspects, the polynucleic acid molecule provided herein comprises a passenger strand comprising a nucleic acid sequence selected from SEQ ID NOs: 401-596, 819-828, and 870-875, and/or a guide strand comprising a nucleic acid sequence selected from SEQ ID NOs: 1-196, 797-806, and 850-857, and wherein the passenger strand and/or guide strand is modified in Type III modification pattern specified in Table 6. In other aspects, the polynucleic acid molecule provided herein comprises a passenger strand comprising a nucleic acid sequence selected from SEQ ID NOs: 405, 407, 408, 411, 418, 420, 422, 440, 443-446, 450, 452, 453, 456, 508, 509, 513, 514, 545, 546, 548, 553, 557, 558, 819-828, and 870-875, and/or a guide strand comprising a nucleic acid sequence selected from SEQ ID NOs: 5, 7, 8, 11, 18, 20, 22, 40, 43, 44, 45, 46, 50, 52, 53, 56, 108, 109, 113, 114, 145, 146, 148, 153, 157, 158, 797-806, and 850-857, and wherein the passenger strand and/or guide strand is modified in Type III modification pattern specified in Table 6. In other aspects, the polynucleic acid molecule provided herein comprises a passenger strand comprising a nucleic acid sequence selected from SEQ ID NOs: 405, 407, 408, 411, 418, 420, 422, 440, 443-446, 450, 452, 453, 456, 508, 509, 513, 514, 545, 546, 548, 553, 557, 558, 819-828, and 870-875, and/or a guide strand comprising a nucleic acid sequence selected from SEQ ID NOs: 5, 7, 8, 11, 18, 20, 22, 40, 43, 44, 45, 46, 50, 52, 53, 56, 108, 109, 113, 114, 145, 146, 148, 153, 157, 158, 797-806, and 850-857, and wherein the passenger strand and/or guide strand is modified in Type III modification pattern specified in Table 6. In other aspects, the polynucleic acid molecule provided herein comprises a passenger strand comprising a nucleic acid sequence selected from SEQ ID NOs: 513, 546, 553, 558, 508, 514, and 545, and/or a guide strand comprising a nucleic acid sequence selected from SEQ ID NOs: 113, 146, 153, 158, 108, 114, and 145, and wherein the passenger strand and/or guide strand is modified in Type III modification pattern specified in Table 6.

[0171] In some aspects, described herein is a specific modification pattern, wherein the passenger strand comprises about three 2′-fluoro modified nucleotides and about eighteen 2′-O-methyl modified nucleotides, and wherein the guide strand comprises about four 2′-fluoro modified nucleotides and about nineteen 2′-O-methyl modified nucleotides.

[0172] In some aspects, described herein is a specific modification pattern, wherein the passenger strand is fully modified and comprises three 2′-fluoro modified nucleotides, eighteen 2′-O-methyl modified nucleotides, and wherein the guide strand is fully modified and comprises four 2′-fluoro modified nucleotides, nineteen 2′-O-methyl modified nucleotides.

[0173] In some aspects, described herein is a specific modification pattern, wherein the passenger strand comprises 5′-nnnnnnNfnNfnNfnnnnnnnnnn-3′, wherein the guide strand comprises 5′-nNfnnnnnnnnnNfnNfnNfnnnnnnn-3′, wherein “Nf” stands for a 2′-fluoro modified nucleotide, and wherein “n” stands for a 2′-O-methyl modified nucleotide.

[0174] In some aspects, described herein is a specific modification pattern, wherein the passenger strand comprises 5′-nnnnnnNfnNfnNfnnnnnnnnnn-3′, wherein the guide strand comprises 5′-nNfnnnnnnnnnNfnNfnNfnnnnnnn-3′, wherein the passenger strand and/or guide strand comprises one or more phosphorothioate linkage, wherein “Nf” stands for a 2′-fluoro modified nucleotide, and wherein “n” stands for a 2′-O-methyl modified nucleotide. In other aspects, described herein is a specific modification pattern, wherein the passenger strand comprises 5′-nnnnnnNfnNfnNfnnnnnnnnnn-3′, wherein the guide strand comprises 5′-nNfnnnnnnnnnNfnNfnNfnnnnnnn-3′, wherein the passenger comprises two phosphorothioate linkages, wherein the guide comprises four phosphorothioate linkages, wherein “Nf” stands for a 2′-fluoro modified nucleotide, and wherein “n” stands for a 2′-O-methyl modified nucleotide.

[0175] In some aspects, described herein is a specific modification pattern, wherein the passenger strand and/or guide strand is modified as Type IV in Table 6.

[0176] In some aspects, the polynucleic acid molecule provided herein comprises a passenger strand comprising a nucleic acid sequence selected from SEQ ID NOs: 401-596, 819-828, and 870-875, and/or a guide strand comprising a nucleic acid sequence selected from SEQ ID NOs: 1-196, 797-806, and 850-857, and wherein the passenger strand and/or guide strand is modified in Type IV modification pattern specified in Table 6. In other aspects, the polynucleic acid molecule provided herein comprises a passenger strand comprising a nucleic acid sequence selected from SEQ ID NOs: 405, 407, 408, 411, 418, 420, 422, 440, 443-446, 450, 452, 453, 456, 508, 509, 513, 514, 545, 546, 548, 553, 557, 558, 819-828, and 870-875, and/or a guide strand comprising a nucleic acid sequence selected from SEQ ID NOs: 5, 7, 8, 11, 18, 20, 22, 40, 43, 44, 45, 46, 50, 52, 53, 56, 108, 109, 113, 114, 145, 146, 148, 153, 157, 158, 797-806, and 850-857, and wherein the passenger strand and/or guide strand is modified in Type IV modification pattern specified in Table 6. In other aspects, the polynucleic acid molecule provided herein comprises a passenger strand comprising a nucleic acid sequence selected from SEQ ID NOs: 405, 407, 408, 411, 418, 420, 422, 440, 443-446, 450, 452, 453, 456, 508, 509, 513, 514, 545, 546, 548, 553, 557, 558, 819-828, and 870-875, and/or a guide strand comprising a nucleic acid sequence selected from SEQ ID NOs: 5, 7, 8, 11, 18, 20, 22, 40, 43, 44, 45, 46, 50, 52, 53, 56, 108, 109, 113, 114, 145, 146, 148, 153, 157, 158, 797-806, and 850-857, and wherein the passenger strand and/or guide strand is modified in Type IV modification pattern specified in Table 6. In other aspects, the polynucleic acid molecule provided herein comprises a passenger strand comprising a nucleic acid sequence selected from SEQ ID NOs: 513, 546, 553, 558, 508, 514, and 545, and/or a guide strand comprising a nucleic acid sequence selected from SEQ ID NOs: 113, 146, 153, 158, 108, 114, and 145, and wherein the passenger strand and/or guide strand is modified in Type IV modification pattern specified in Table 6.

[0177] In some aspects, described herein is a specific modification pattern, wherein the passenger strand comprises about three 2′-fluoro modified nucleotides and about eighteen 2′-O-methyl modified nucleotides, and wherein the guide strand comprises about five 2′-fluoro modified nucleotides and about eighteen 2′-O-methyl modified nucleotides.

[0178] In some aspects, described herein is a specific modification pattern, wherein the passenger strand is fully modified and comprises three 2′-fluoro modified nucleotides and eighteen 2′-O-methyl modified nucleotides, and wherein the guide strand is fully modified and comprises five 2′-fluoro modified nucleotides, eighteen 2′-O-methyl modified nucleotides.

[0179] In some aspects, described herein is a specific modification pattern, wherein the passenger strand comprises 5′-nnnnnnNfnNfnNfnnnnnnnnnn-3′, wherein the guide strand comprises 5′-_nNfnnnnNfnnnnNfnNfnNfnnnnnnn-3′, wherein “Nf” stands for a 2′-fluoro modified nucleotide, and wherein “n” stands for a 2′-O-methyl modified nucleotide.

[0180] In some aspects, described herein is a specific modification pattern, wherein the passenger strand comprises 5′-nnnnnnNfnNfnNfnnnnnnnnnn-3′, wherein the guide strand comprises 5′-nNfnnnnNfnnnnNfnNfnNfnnnnnnn-3′, wherein the passenger strand and/or guide strand comprises one or more phosphorothioate linkage, wherein “Nf” stands for a 2′-fluoro modified nucleotide, and wherein “n” stands for a 2′-O-methyl modified nucleotide. In other aspects, described herein is a specific modification pattern, wherein the passenger strand comprises 5′-nnnnnnNfnNfnNfnnnnnnnnnn-3′, wherein the guide strand comprises 5′-nNfnnnnNfhnnnNfnNfnNfnnnnnnn-3′, wherein the passenger strand comprises two phosphorothioate linkages, wherein the guide comprises four phosphorothioate linkages, wherein “Nf” stands for a 2′-fluoro modified nucleotide, and wherein “n” stands for a 2′-O-methyl modified nucleotide.

[0181] In some aspects, described herein is a specific modification pattern, wherein the passenger strand and/or guide strand is modified as Type V in Table 6.

[0182] In some aspects, the polynucleic acid molecule provided herein comprises a passenger strand comprising a nucleic acid sequence selected from SEQ ID NOs: 401-596, 819-828, and 870-875, and/or a guide strand comprising a nucleic acid sequence selected from SEQ ID NOs: 1-196, 797-806, and 850-857, and wherein the passenger strand and/or guide strand is modified in Type V modification pattern specified in Table 6. In other aspects, the polynucleic acid molecule provided herein comprises a passenger strand comprising a nucleic acid sequence selected from SEQ ID NOs: 405, 407, 408, 411, 418, 420, 422, 440, 443-446, 450, 452, 453, 456, 508, 509, 513, 514, 545, 546, 548, 553, 557, 558, 819-828, and 870-875, and/or a guide strand comprising a nucleic acid sequence selected from SEQ ID NOs: 5, 7, 8, 11, 18, 20, 22, 40, 43, 44, 45, 46, 50, 52, 53, 56, 108, 109, 113, 114, 145, 146, 148, 153, 157, 158, 797-806, and 850-857, and wherein the passenger strand and/or guide strand is modified in Type V modification pattern specified in Table 6. In other aspects, the polynucleic acid molecule provided herein comprises a passenger strand comprising a nucleic acid sequence selected from SEQ ID NOs: 405, 407, 408, 411, 418, 420, 422, 440, 443-446, 450, 452, 453, 456, 508, 509, 513, 514, 545, 546, 548, 553, 557, 558, 819-828, and 870-875, and/or a guide strand comprising a nucleic acid sequence selected from SEQ ID NOs: 5, 7, 8, 11, 18, 20, 22, 40, 43, 44, 45, 46, 50, 52, 53, 56, 108, 109, 113, 114, 145, 146, 148, 153, 157, 158, 797-806, and 850-857, and wherein the passenger strand and/or guide strand is modified in Type V modification pattern specified in Table 6. In other aspects, the polynucleic acid molecule provided herein comprises a passenger strand comprising a nucleic acid sequence selected from SEQ ID NOs: 513, 546, 553, 558, 508, 514, and 545, and/or a guide strand comprising a nucleic acid sequence selected from SEQ ID NOs: 113, 146, 153, 158, 108, 114, and 145, and wherein the passenger strand and/or guide strand is modified in Type V modification pattern specified in Table 6.

[0183] In some aspects, described herein is a specific modification pattern, wherein the passenger strand comprises about three 2′-fluoro modified nucleotides and about eighteen 2′-O-methyl modified nucleotides, with one or more inverted deoxy-nucleotides on the 3′ end as an overhang.

[0184] In some aspects, described herein is a specific modification pattern, wherein the passenger strand is fully modified and comprises three 2′-fluoro modified nucleotides and eighteen 2′-O-methyl modified nucleotides, with two inverted deoxy-nucleotides on the 3′ end as an overhang.

[0185] In some aspects, described herein is a specific modification pattern, wherein the passenger strand comprises 5′-nnnnnnNfnNfnNfnnnnnnnnnn-invdN-invdN-3′, wherein “Nf” stands for a 2′-fluoro modified nucleotide, wherein “n” stands for a 2′-O-methyl modified nucleotide, and “invdN” stands for an inverted deoxy-nucleotide. In some instances, the invdN is an inverted deoxyl-thymine. In some aspects, the linker conjugated with one or more targeting moieties as shown in Formula (IV″) or (IV″′) is added to the first nucleic acid on the 5′ end. In some aspects, the linker conjugated with one or more GalNAc as shown in Formula (V″) or (V″′) is added to the first nucleic acid on the 5′ end. In some aspects, the modification pattern comprises one or more phosphorothioate linkages. In some aspects, the modification pattern is shown in Formula (VII). In some aspects, the 5′ end modification known in the art is applied to the one or more inverted nucleotides.

[chemical structure]

wherein R is a moiety that corresponds to the sugar modification described herein, in some instances, R is —O-methyl; wherein R′ is thymine, abasic, or others; wherein A is —O or —S; and wherein A′ is —O or —S.

[0186] In some aspects, the polynucleic acid molecule provided herein comprises a passenger strand comprising a nucleic acid sequence selected from SEQ ID NOs: 401-596, 819-828, and 870-875, and/or a guide strand comprising a nucleic acid sequence selected from SEQ ID NOs: 1-196, 797-806, and 850-857, and wherein the passenger strand is modified in Type VI modification pattern specified in Table 6 or as described in the preceding paragraph. In other aspects, the polynucleic acid molecule provided herein comprises a passenger strand comprising a nucleic acid sequence selected from SEQ ID NOs: 405, 407, 408, 411, 418, 420, 422, 440, 443-446, 450, 452, 453, 456, 508, 509, 513, 514, 545, 546, 548, 553, 557, 558, 819-828, and 870-875, and/or a guide strand comprising a nucleic acid sequence selected from SEQ ID NOs: 5, 7, 8, 11, 18, 20, 22, 40, 43, 44, 45, 46, 50, 52, 53, 56, 108, 109, 113, 114, 145, 146, 148, 153, 157, 158, 797-806, and 850-857, and wherein the passenger strand is modified in Type VI modification pattern specified in Table 6 or as described in the preceding paragraph. In other aspects, the polynucleic acid molecule provided herein comprises a passenger strand comprising a nucleic acid sequence selected from SEQ ID NOs: 405, 407, 408, 411, 418, 420, 422, 440, 443-446, 450, 452, 453, 456, 508, 509, 513, 514, 545, 546, 548, 553, 557, 558, 819-828, and 870-875, and/or a guide strand comprising a nucleic acid sequence selected from SEQ ID NOs: 5, 7, 8, 11, 18, 20, 22, 40, 43, 44, 45, 46, 50, 52, 53, 56, 108, 109, 113, 114, 145, 146, 148, 153, 157, 158, 797-806, and 850-857, and wherein the passenger strand is modified in Type VI modification pattern specified in Table 6 or as described in the preceding paragraph. In other aspects, the polynucleic acid molecule provided herein comprises a passenger strand comprising a nucleic acid sequence selected from SEQ ID NOs: 513, 546, 553, 558, 508, 514, and 545, and/or a guide strand comprising a nucleic acid sequence selected from SEQ ID NOs: 113, 146, 153, 158, 108, 114, and 145, and wherein the passenger strand is modified in Type VI modification pattern specified in Table 6 or as described in the preceding paragraph.

[0187] In some aspects, described herein is a specific modification pattern, wherein the passenger strand comprises about three 2′-fluoro modified nucleotides and about eighteen 2′-O-methyl modified nucleotides, and wherein the guide strand comprises about four 2′-fluoro modified nucleotides and about nineteen 2′-O-methyl modified nucleotides.

[0188] In some aspects, described herein is a specific modification pattern, wherein the passenger strand is fully modified and comprises three 2′-fluoro modified nucleotides, eighteen 2′-O-methyl modified nucleotides, and wherein the guide strand is fully modified and comprises four 2′-fluoro modified nucleotides, nineteen 2′-O-methyl modified nucleotides.

[0189] In some aspects, described herein is a specific modification pattern, wherein the passenger strand comprises 5′-nsnsnnnnNfnNfnNfnnnnnnnnnn-3′, wherein the guide strand comprises 5′-nsNfsnnnnNfnnnnNfnNfnNfnnnnnsnsn-3′, wherein “Nf” stands for a 2′-fluoro modified nucleotide, and wherein “n” stands for a 2′-O-methyl modified nucleotide.

[0190] In some aspects, described herein is a specific modification pattern, wherein the passenger strand comprises 5′-nsnsnnnnNfnNfnNfnnnnnnnnnn-3′, wherein the guide strand comprises 5′-nsNfsnnnnNfnnnnNfnNfnNfnnnnnsnsn-3′, wherein the passenger strand and/or guide strand comprises one or more phosphorothioate linkage, wherein “Nf” stands for a 2′-fluoro modified nucleotide, and wherein “n” stands for a 2′-O-methyl modified nucleotide. In other aspects, described herein is a specific modification pattern, wherein the passenger strand comprises 5′-nsnsnnnnNfnNfnNfmrnnnnnnnn-3′, wherein the guide strand comprises 5′-nsNfsnnnnNfhnnnNfnNfnNfnnnnsnsn-3′, wherein the passenger comprises two phosphorothioate linkages, wherein the guide comprises four phosphorothioate linkages, wherein “Nf” stands for a 2′-fluoro modified nucleotide, and wherein “n” stands for a 2′-O-methyl modified nucleotide.

[0191] Described herein is a polynucleic acid molecule, whose passenger strand comprises a nucleic acid sequence that is at least 80% identical to a nucleic acid sequence selected from SEQ ID NOs: 601-796, 830-839, and 876-881. Described herein is a polynucleic acid molecule, whose passenger strand comprises a nucleic acid sequence that is at least 85% identical to a nucleic acid sequence selected from SEQ ID NOs: 601-796, 830-839, and 876-881. Described herein is a polynucleic acid molecule, whose passenger strand comprises a nucleic acid sequence that is at least 90% identical to a nucleic acid sequence selected from SEQ ID NOs: 601-796, 830-839, and 876-881. Described herein is a polynucleic acid molecule, whose passenger strand comprises a nucleic acid sequence that is at least 95% identical to a nucleic acid sequence selected from SEQ ID NOs: 601-796, 830-839, and 876-881.

[0192] Described herein is a polynucleic acid molecule, which guide strand comprises a nucleic acid sequence that is at least 80% identical to a nucleic acid sequence selected from SEQ ID NOs: 201-396, 808-817, and 858-868. Described herein is a polynucleic acid molecule, which guide strand comprises a nucleic acid sequence that is at least 85% identical to a nucleic acid sequence selected from SEQ ID NOs: 201-396, 808-817, and 858-868. Described herein is a polynucleic acid molecule, which guide strand comprises a nucleic acid sequence that is at least 90% identical to a nucleic acid sequence selected from SEQ ID NOs: 201-396, 808-817, and 858-868. Described herein is a polynucleic acid molecule, which guide strand comprises a nucleic acid sequence that is at least 95% identical to a nucleic acid sequence selected from SEQ ID NOs: 201-396, 808-817, and 858-868.

[0193] A polynucleic acid molecule for modulating expression of ANGPTL3 gene, wherein polynucleic acid molecule comprises a guide strand comprising the nucleotide sequence selected from SEQ ID NOs: 5, 7, 8, 11, 18, 20, 22, 40, 43, 44, 45, 46, 50, 52, 53, 56, 108, 109, 113, 114, 145, 146, 148, 153, 157, 158, 797-806, and 850-857 and a passenger strand comprising the nucleotide sequence selected from SEQ ID NOs: 405, 407, 408, 411, 418, 420, 422, 440, 443-446, 450, 452, 453, 456, 508, 509, 513, 514, 545, 546, 548, 553, 557, 558, 819-828, and 870-875.

[0194] A polynucleic acid molecule for modulating expression of ANGPTL3 gene, wherein polynucleic acid molecule comprises a guide strand comprising the nucleotide sequence selected from SEQ ID NOs: 5, 7, 8, 11, 18, 20, 22, 40, 43, 44, 45, 46, 50, 52, 53, 56, 108, 109, 113, 114, 145, 146, 148, 153, 157, 158, 797-806, and 850-857 and a passenger strand comprising the nucleotide sequence selected from SEQ ID NOs: 405, 407, 408, 411, 418, 420, 422, 440, 443-446, 450, 452, 453, 456, 508, 509, 513, 514, 545, 546, 548, 553, 557, 558, 819-828, and 870-875.

[0195] A polynucleic acid molecule for modulating expression of ANGPTL3 gene, wherein polynucleic acid molecule comprises a guide strand comprising the nucleotide sequence selected from SEQ ID NOs: 113, 146, 153, 158, 108, 114, and 145 and a passenger strand comprising the nucleotide sequence selected from SEQ ID NOs: 513, 546, 553, 558, 508, 514, and 545.

[0196] A polynucleic acid molecule for modulating expression of ANGPTL3 gene, wherein polynucleic acid molecule comprises a guide strand comprising the nucleotide sequence selected from SEQ ID NOs: 205, 207, 208, 211, 218, 220, 222, 240, 243-246, 250, 252, 253, 256, 308, 309, 313, 314, 345, 346, 348, 353, 357, 358, 808-817, and 858-868 and a passenger strand comprising the nucleotide sequence selected from SEQ ID NOs: 605, 607, 608, 611, 618, 620, 622, 640, 643, 644, 645, 646, 650, 652, 653, 656, 708, 709, 713, 714, 745, 746, 748, 753, 757, 758, 830-839, and 876-881.

[0197] A polynucleic acid molecule for modulating expression of ANGPTL3 gene, wherein polynucleic acid molecule comprises a guide strand comprising the nucleotide sequence selected from SEQ ID NOs: 205, 207, 208, 211, 218, 220, 222, 240, 243-246, 250, 252, 253, 256, 308, 309, 313, 314, 345, 346, 348, 353, 357, 358, 808-817, and 858-868, and a passenger strand comprising the nucleotide sequence selected from SEQ ID NOs: 605, 607, 608, 611, 618, 620, 622, 640, 643, 644, 645, 646, 650, 652, 653, 656, 708, 709, 713, 714, 745, 746, 748, 753, 757, 758, 830-839, and 876-881.

[0198] A polynucleic acid molecule for modulating expression of ANGPTL3 gene, wherein polynucleic acid molecule comprises a guide strand comprising the nucleotide sequence selected from SEQ ID NOs: 313, 346, 353, 358, 308, 314, and 345, and a passenger strand comprising the nucleotide sequence selected from SEQ ID NOs: 713, 746, 753, 758, 708, 714, and 745.

[0199] A polynucleic acid molecule for modulating expression of ANGPTL3 gene, wherein polynucleic acid molecule comprises a guide strand comprising the nucleotide sequence of usUfsaguuGfguuuCfgUfgAfuuuccscsa (SEQ ID NO: 313) and a passenger strand comprising the nucleotide sequence of gsgsaaauCfaCfgAfaaccaacuaa (SEQ ID NO: 713), where smaller case “n” stands for 2′-O-methyl modified nucleotide, upper case followed with an “f” (i.e., “Nf”) stands for 2′-fluoro modified nucleotide, and “s” stands for 3′-phosphorothioate.

[0200] A polynucleic acid molecule for modulating expression of ANGPTL3 gene, wherein polynucleic acid molecule comprises a guide strand comprising the nucleotide sequence of usUfsagagUfauaaCfcUfuCfcauuususg (SEQ ID NO: 346) and a passenger strand comprising the nucleotide sequence of asasauggAfaGfgUfuauacucuaa (SEQ ID NO: 746), where smaller case “n” stands for 2′-O-methyl modified nucleotide, upper case followed with an “f” (i.e., “Nf”) stands for 2′-fluoro modified nucleotide, and “s” stands for 3′-phosphorothioate.

[0201] A polynucleic acid molecule for modulating expression of ANGPTL3 gene, wherein polynucleic acid molecule comprises a guide strand comprising the nucleotide sequence of usAfsuggaUfcaacAfuUfuUfgguugsasu (SEQ ID NO: 353) and a passenger strand comprising the nucleotide sequence of csasaccaAfaAfuGfuugauccaua (SEQ ID NO: 753), where smaller case “n” stands for 2′-O-methyl modified nucleotide, upper case followed with an “f” (i.e., “Nf”) stands for 2′-fluoro modified nucleotide, and “s” stands for 3′-phosphorothioate.

[0202] A polynucleic acid molecule for modulating expression of ANGPTL3 gene, wherein polynucleic acid molecule comprises a guide strand comprising the nucleotide sequence of usUfsaaggAfuuuaAfuAfcCfagauusasu (SEQ ID NO: 358) and a passenger strand comprising the nucleotide sequence of asasucugGfuAfuUfaaauccuuaa (SEQ ID NO: 758), where smaller case “n” stands for 2′-O-methyl modified nucleotide, upper case followed with an “f” (i.e., “Nf”) stands for 2′-fluoro modified nucleotide, and “s” stands for 3′-phosphorothioate.

[0203] A polynucleic acid molecule for modulating expression of ANGPTL3 gene, wherein polynucleic acid molecule comprises a guide strand comprising the nucleotide sequence of usAfsuuagAfuugcUfuCfaCfuauggsasg (SEQ ID NO: 308) and a passenger strand comprising the nucleotide sequence of cscsauagUfgAfaGfcaaucuaaua (SEQ ID NO: 708), where smaller case “n” stands for 2′-O-methyl modified nucleotide, upper case followed with an “f” (i.e., “Nf”) stands for 2′-fluoro modified nucleotide, and “s” stands for 3′-phosphorothioate.

[0204] A polynucleic acid molecule for modulating expression of ANGPTL3 gene, wherein polynucleic acid molecule comprises a guide strand comprising the nucleotide sequence of usUfsauagUfugguUfuCfgUfgauuuscsc (SEQ ID NO: 314) and a passenger strand comprising the nucleotide sequence of asasaucaCfgAfaAfccaacuauaa (SEQ ID NO: 714), where smaller case “n” stands for 2′-O-methyl modified nucleotide, upper case followed with an “f” (i.e., “Nf”) stands for 2′-fluoro modified nucleotide, and “s” stands for 3′-phosphorothioate.

[0205] A polynucleic acid molecule for modulating expression of ANGPTL3 gene, wherein polynucleic acid molecule comprises a guide strand comprising the nucleotide sequence of usAfsgaguAfuaacCfuUfcCfauuuusgsa (SEQ ID NO: 345) and a passenger strand comprising the nucleotide sequence of asasaaugGfaAfgGfuuauacucua (SEQ ID NO: 745), where smaller case “n” stands for 2′-O-methyl modified nucleotide, upper case followed with an “f” (i.e., “Nf”) stands for 2′-fluoro modified nucleotide, and “s” stands for 3′-phosphorothioate.

[0206] A polynucleic acid molecule for modulating expression of ANGPTL3 gene, wherein polynucleic acid molecule comprises a guide strand comprising the nucleotide sequence of usUfsaauuAfgauuGfcUfuCfacuausgsg (SEQ ID NO: 309) and a passenger strand comprising the nucleotide sequence of asusagugAfaGfcAfaucuaauuaa (SEQ ID NO: 709), where smaller case “n” stands for 2′-O-methyl modified nucleotide, upper case followed with an “f” (i.e., “Nf”) stands for 2′-fluoro modified nucleotide, and “s” stands for 3′-phosphorothioate.

[0207] A polynucleic acid molecule for modulating expression of ANGPTL3 gene, wherein polynucleic acid molecule comprises a guide strand comprising the nucleotide sequence of usAfsauuaGfauugCfuUfcAfcuaugsgsa (SEQ ID NO: 815) and a passenger strand comprising the nucleotide sequence of csasuaguGfaAfgCfaaucuaauua (SEQ ID NO: 837), where smaller case “n” stands for 2′-O-methyl modified nucleotide, upper case followed with an “f” (i.e., “Nf”) stands for 2′-fluoro modified nucleotide, and “s” stands for 3′-phosphorothioate.

[0208] A polynucleic acid molecule for modulating expression of ANGPTL3 gene, wherein polynucleic acid molecule comprises a guide strand comprising the nucleotide sequence of usUfsucauUfgaagUfuUfuGfugaucscsa (SEQ ID NO: 812) and a passenger strand comprising the nucleotide sequence of gsasucacAfaAfaCfuucaaugaaa (SEQ ID NO: 834), where smaller case “n” stands for 2′-O-methyl modified nucleotide, upper case followed with an “f” (i.e., “Nf”) stands for 2′-fluoro modified nucleotide, and “s” stands for 3′-phosphorothioate.

[0209] A polynucleic acid molecule for modulating expression of ANGPTL3 gene, wherein polynucleic acid molecule comprises a guide strand comprising the nucleotide sequence of usAfsuugcUfucacUfaUfgGfaguausasu (SEQ ID NO: 813) and a passenger strand comprising the nucleotide sequence of asusacucCfaUfaGfugaagcaaua (SEQ ID NO: 835), where smaller case “n” stands for 2′-O-methyl modified nucleotide, upper case followed with an “f” (i.e., “Nf”) stands for 2′-fluoro modified nucleotide, and “s” stands for 3′-phosphorothioate.

[0210] A polynucleic acid molecule for modulating expression of ANGPTL3 gene, wherein polynucleic acid molecule comprises a guide strand comprising the nucleotide sequence of usAfsgaguAfuaacCfuUfcCfauuucsgsa (SEQ ID NO: 865) and a passenger strand comprising the nucleotide sequence of gsasaaugGfaAfgGfuuauacucua (SEQ ID NO: 879), where smaller case “n” stands for 2′-O-methyl modified nucleotide, upper case followed with an “f” (i.e., “Nf”) stands for 2′-fluoro modified nucleotide, and “s” stands for 3′-phosphorothioate.

[0211] A polynucleic acid molecule for modulating expression of ANGPTL3 gene, wherein polynucleic acid molecule comprises a guide strand comprising the nucleotide sequence of usAfsgaguAfuaacCfuUfcCfauuccsgsa (SEQ ID NO: 866) and a passenger strand comprising the nucleotide sequence of gsgsaaugGfaAfgGfuuauacucua (SEQ ID NO: 880), where smaller case “n” stands for 2′-O-methyl modified nucleotide, upper case followed with an “f” (i.e., “Nf”) stands for 2′-fluoro modified nucleotide, and “s” stands for 3′-phosphorothioate.

[0212] In one aspect, described herein is a specific modification motif or pattern for the double-stranded inhibitiory polynucleic acid molecule comprising a passenger strand and a guide strand.

[0213] In some aspects, the guide strand comprises a nucleotide analogue selected from acyclic L-threoninol nucleic acid-thymine-3′-phosphate (T-T), acyclic L-threoninol nucleic acid-adenine-3′-phosphate (T-A), acyclic N-acetyl L-threoninol abasic nucleic acid-3′phosphate (T-NAc), 1′,2′-Dideoxyribose-3′-phosphate (dAB), thymidine-glycol nucleic acid (GNA)S-isomer (Tgn), 2′-O-methyl-2-thiouridine-3′-phosphate (u3), 2′-fluoro-2-thiouridine-3′-phosphate (U3f), or 2-amino-2′-O-methyladenosine-3′-phosphate (al). In some instance, the nucleotide analogue is selected from a group consisting of the nucleotide analogue selected from acyclic L-threoninol nucleic acid-thymine-3′-phosphate (T-T), acyclic L-threoninol nucleic acid-adenine-3′-phosphate (T-A), acyclic N-acetyl L-threoninol abasic nucleic acid-3′phosphate (T-NAc), 1′,2′-Dideoxyribose-3′-phosphate (dAB), thymidine-glycol nucleic acid (GNA)S-isomer (Tgn), 2′-O-methyl-2-thiouridine-3′-phosphate (u3), 2′-fluoro-2-thiouridine-3′-phosphate (U3), and 2-amino-2′-O-methyladenosine-3′-phosphate (al). In some instances, the nucleotide analogue is selected from a group consisting of the nucleotide analogue selected from acyclic L-threoninol nucleic acid-thymine-3′-phosphate (T-T), acyclic L-threoninol nucleic acid-adenine-3′-phosphate (T-A), acyclic N-acetyl L-threoninol abasic nucleic acid-3′phosphate (T-NAc), 1′,2′-Dideoxyribose-3′-phosphate (dAB), thymidine-glycol nucleic acid (GNA)S-isomer (Tgn), 2′-O-methyl-2-thiouridine-3′-phosphate (u3), and 2′-fluoro-2-thiouridine-3′-phosphate (U3). In some instances, the nucleotide analogue is selected from a group consisting of the nucleotide analogue selected from acyclic L-threoninol nucleic acid-thymine-3′-phosphate (T-T), acyclic L-threoninol nucleic acid-adenine-3′-phosphate (T-A), acyclic N-acetyl L-threoninol abasic nucleic acid-3′phosphate (T-NAc), and 1′,2′-Dideoxyribose-3′phosphate (dAB). In some instances, the guide strand comprises a nucleotide analogue selected from a group consisting of acyclic L-threoninol nucleic acid-thymine-3′-phosphate (T-T), acyclic L-threoninol nucleic acid-adenine-3′-phosphate (T-A), acyclic N-acetyl L-threoninol abasic nucleic acid-3′phosphate (T-NAc), and 1′,2′-Dideoxyribose-3′phosphate (dAB).

[0214] In some aspects, the guide strand comprises a nucleotide analogue at one of positions 2-8 from the 5′ end, and further comprises a 2′-fluoro modified nucleotide at position 2 from the 5′ end. In some aspects, the guide strand comprises a nucleotide analogue at one of positions 2-8 from the 5′ end, and further comprises a 2′-fluoro modified nucleotide at position 7 from the 5′ end. In some aspects, the guide strand comprises a nucleotide analogue at one of positions 2-8 from the 5′ end, and further comprises 2′-fluoro modified nucleotides at position 12 from the 5′ end. In some aspects, the guide strand comprises a nucleotide analogue at one of positions 2-8 from the 5′ end, and further comprises a 2′-fluoro modified nucleotide at position 14 from the 5′ end. In some aspects, the guide strand comprises a nucleotide analogue at one of positions 2-8 from the 5′ end, and further comprises a 2′-fluoro modified nucleotide at position 16 from the 5′ end. In other aspects, the guide strand comprises a nucleotide analogue at one of positions 2-8 from the 5′ end, and further comprises a 2′-fluoro modified nucleotide at positions 2, 12, 14, 16, or combination thereof from the 5′ end. In other aspects, the guide strand comprises a nucleotide analogue at one of positions 2-8 from the 5′ end, and further comprises a 2′-fluoro modified nucleotide at positions 2, 7, 12, 14, 16, or combination thereof from the 5′ end. In other aspects, the guide strand comprises a nucleotide analogue at one of positions 2-8 from the 5′ end, and further comprises a 2′-fluoro modified nucleotide at at least three of positions 2, 12, 14, and 16 from the 5′ end. In other aspects, the guide strand comprises a nucleotide analogue at one of positions 2-8 from the 5′ end, and further comprises a 2′-fluoro modified nucleotide at at least three of positions 2, 7, 12, 14, and 16 from the 5′ end.

[0215] In some instances, the nucleotide analogue is located at position 6 from the 5′ end of the guide strand. In some instances, the nucleotide analogue is located at position 6 from the 5′ end of the guide strand, and the guide strand further comprises 2′-fluoro (2′-F) modified nucleotides at at least one of positions 2, 7, 12, 14, and 16 from the 5′ end. In some instances, the nucleotide analogue is located at position 6 from the 5′ end of the guide strand, and the guide strand further comprises 2′-fluoro (2′-F) modified nucleotides at at least two of positions 2, 7, 12, 14, and 16 from the 5′ end. In some instances, the nucleotide analogue is located at position 6 from the 5′ end of the guide strand, and the guide strand further comprises 2′-fluoro (2′-F) modified nucleotides at at least three of positions 2, 7, 12, 14, and 16 from the 5′ end. In some instances, the nucleotide analogue is located at position 6 from the 5′ end of the guide strand, and the guide strand further comprises 2′-fluoro (2′-F) modified nucleotides at positions 2, 7, 12, 14, and 16 from the 5′ end.

[0216] In some instances, the nucleotide analogue is located at position 7 from the 5′ end of the guide strand. In some instances, the nucleotide analogue is located at position 7 from the 5′ end of the guide strand, and the guide strand further comprises 2′-fluoro (2′-F) modified nucleotides at at least one of positions 2, 6, 8, 12, 14, and 16 from the 5′ end. In some instances, the nucleotide analogue is located at position 7 from the 5′ end of the guide strand, and the guide strand further comprises 2′-fluoro (2′-F) modified nucleotides at at least one of positions 2, 12, 14, and 16 from the 5′ end. In some instances, the nucleotide analogue is located at position 7 from the 5′ end of the guide strand, and the guide strand further comprises 2′-fluoro (2′-F) modified nucleotides at at least two of positions 2, 12, 14, and 16 from the 5′ end. In some instances, the nucleotide analogue is located at position 7 from the 5′ end of the guide strand, and the guide strand further comprises 2′-fluoro (2′-F) modified nucleotides at at least three of positions 2, 12, 14, and 16 from the 5′ end. In some instances, the nucleotide analogue is located at position 7 from the 5′ end of the guide strand, and the guide strand further comprises 2′-fluoro (2′-F) modified nucleotides at positions 2, 12, 14, and 16 from the 5′ end. In some instances, the nucleotide analogue is located at position 7 from the 5′ end of the guide strand, and the guide strand comprises 2′-F modified nucleotides at positions 2, 6, 12, 14, and 16 from the 5′ end. In some instances, the nucleotide analogue is located at position 7 from the 5′ end of the guide strand, and the guide strand comprises 2′-F modified nucleotides at positions 2, 8, 12, 14, and 16 from the 5′ end.

[0217] In some instances, the nucleotide analogue is located at position 8 from the 5′ end of the guide strand. In some instances, the nucleotide analogue is located at position 8 from the 5′ end of the guide strand, and the guide strand further comprises 2′-fluoro (2′-F) modified nucleotides at at least one of positions 2, 7, 12, 14, and 16 from the 5′ end. In some instances, the nucleotide analogue is located at position 8 from the 5′ end of the guide strand, and the guide strand further comprises 2′-fluoro (2′-F) modified nucleotides at at least two of positions 2, 7, 12, 14, and 16 from the 5′ end. In some instances, the nucleotide analogue is located at position 8 from the 5′ end of the guide strand, and the guide strand further comprises 2′-fluoro (2′-F) modified nucleotides at at least three of positions 2, 7, 12, 14, and 16 from the 5′ end. In some instances, the nucleotide analogue is located at position 8 from the 5′ end of the guide strand, and the guide strand further comprises 2′-fluoro (2′-F) modified nucleotides at positions 2, 7, 12, 14, and 16 from the 5′ end.

[0218] In some instances, the nucleotides of the guide strand comprises DNA or RNA. As described herein, in some instances, the DNA nucleotide comprises an unmodified DNA comprising: an unmodified adenine nucleotide (A), an unmodified guanine nucleotide (G), an unmodified thymine nucleotide (T), or an unmodified cytosine nucleotide (C). As described herein, in some instances, the RNA comprises an unmodified RNA comprising: an unmodified adenine nucleotide (A), an unmodified guanine nucleotide (G), an unmodified uracil nucleotide (U), or an unmodified cytosine nucleotide (C).

[0219] In some instances, the nucleotides of the guide strand comprises the DNA, RNA, nucleotide analogue, 2′-F modified nucleotide, or 2′-O-alkyl modified nucleotide. In some instances, the 2′-O-alkly modified nucleotide comprises 2′-O-methyl modified nucleotides. In some instances, the nucleotides of the guide strand that are not the nucleotide analogue or 2′-F modified nucleotide are selected from DNA nucleotide, RNA nucleotide, and 2′-O-alkly modified nucleotide. In some instances, the nucleotides of the guide strand that are not the nucleotide analogue or 2′-F modified nucleotide are 2′-O-methyl modified nucleotides.

[0220] In some instances, the guide strand comprises at least one, at least two, at least three, at least four, at least five, at least six, at least seven, or at least eight phosphorothioate modified internucleotide linkages. In some instances, the guide strand comprises at least two, at least three, or at least four phosphorothioate modified internucleotide linkages. In some instances, the guide strand comprises at most one, at most two, at most three, at most four, at most five, at most six, at most seven, or at most eight phosphorothioate modified internucleotide linkages. In some instances, the guide strand comprises one, two, three, four, five, six, seven, or eight phosphorothioate modified internucleotide linkages. In some instances, the guide strand comprises from 1 to 8, from 2 to 8, from 3 to 8, from 4 to 8, from 5 to 8, or from 6 to 8 phosphorothioate modified intemucleotide linkages. In some instances, the guide strand comprises from 1 to 4, from 2 to 4, or from 3 to 4 phosphorothioate modified intemucleotide linkages.

[0221] In some instances, the guide strand comprises one phosphorothioate modified intemucleotide linkages at the 5′ end and one phosphorothioate modified intemucleotide linkages at the 3′ end. In some instances, the guide strand comprises two phosphorothioate modified intemucleotide linkages at the 5′ end and two phosphorothioate modified intemucleotide linkages at the 3′ end. In some instances, the guide strand comprises three phosphorothioate modified intemucleotide linkages at the 5′ end and three phosphorothioate modified intemucleotide linkages at the 3′ end. In some instances, the guide strand comprises four phosphorothioate modified intemucleotide linkages at the 5′ end and four phosphorothioate modified intemucleotide linkages at the 3′ end.

[0222] In some instances, the guide strand comprises 2′-O-methyl modified nucleotide, 2′-F modified nucleotide, and/or nucleotide analogue described herein. In some instances, the guide strand comprises a nucleic acid sequence of 5′-mFmmmXFmmmmFmFmFmmmmmmm-3′, wherein m is 2′-O-methyl modified nucleotide, F is 2′-fluoro (2′-F) modified nucleotide, and X is selected from acyclic L-threoninol nucleic acid-thymine-3′-phosphate (T-T), acyclic L-threoninol nucleic acid-adenine-3′-phosphate (T-A), acyclic N-acetyl L-threoninol abasic nucleic acid-3′phosphate (T-NAc), 1′,2′-Dideoxyribose-3′-phosphate (dAB), thymidine-glycol nucleic acid (GNA)S-isomer (Tgn), 2′-O-methyl-2-thiouridine-3′-phosphate (u3), 2′-fluoro-2-thiouridine-3′-phosphate (U3f), and 2-amino-2′-O-methyladenosine-3′-phosphate (al). In some instances, the guide strand comprises a nucleic acid sequence of 5′-mFmmmXFmmmmFmFmFmmmmmmm-3′, wherein m is 2′-O-methyl modified nucleotide, F is 2′-fluoro (2′-F) modified nucleotide, and X is selected from acyclic L-threoninol nucleic acid-thymine-3′-phosphate (T-T), acyclic L-threoninol nucleic acid-adenine-3′-phosphate (T-A), acyclic N-acetyl L-threoninol abasic nucleic acid-3′phosphate (T-NAc), 1′,2′-Dideoxyribose-3′-phosphate (dAB), and thymidine-glycol nucleic acid (GNA)S-isomer (Tgn).

[0223] In some instances, the guide strand comprises a nucleic acid sequence of 5′-mFmmmmXmmmmFmFmFmmmmmmm-3′, wherein m is 2′-O-methyl modified nucleotide, F is 2′-F modified nucleotide, and X is selected from acyclic L-threoninol nucleic acid-thymine-3′-phosphate (T-T), acyclic L-threoninol nucleic acid-adenine-3′-phosphate (T-A), acyclic N-acetyl L-threoninol abasic nucleic acid-3′phosphate (T-NAc), 1′,2′-Dideoxyribose-3′-phosphate (dAB), thymidine-glycol nucleic acid (GNA)S-isomer (Tgn), 2′-O-methyl-2-thiouridine-3′-phosphate (u3), 2′-fluoro-2-thiouridine-3′-phosphate (U3f), and 2-amino-2′-O-methyladenosine-3′-phosphate (al). In some instances, the guide strand comprises a nucleic acid sequence of 5′-mFmmmmXmmmmFmFmFmmmmmmm-3′, wherein m is 2′-O-methyl modified nucleotide, F is 2′-F modified nucleotide, and X is selected from acyclic L-threoninol nucleic acid-thymine-3′-phosphate (T-T), acyclic L-threoninol nucleic acid-adenine-3′-phosphate (T-A), acyclic N-acetyl L-threoninol abasic nucleic acid-3′phosphate (T-NAc), 1′,2′-Dideoxyribose-3′-phosphate (dAB), and thymidine-glycol nucleic acid (GNA)S-isomer (Tgn).

[0224] In some instances, the guide strand comprises a nucleic acid sequence of 5′-mFmmmFXmmmmFmFmFmmmmmmm-3′, wherein m is 2′-O-methyl modified nucleotide, F is 2′-F modified nucleotide, and X is selected from acyclic L-threoninol nucleic acid-thymine-3′-phosphate (T-T), acyclic L-threoninol nucleic acid-adenine-3′-phosphate (T-A), acyclic N-acetyl L-threoninol abasic nucleic acid-3′phosphate (T-NAc), 1′,2′-Dideoxyribose-3′-phosphate (dAB), thymidine-glycol nucleic acid (GNA)S-isomer (Tgn), 2′-O-methyl-2-thiouridine-3′-phosphate (u3), 2′-fluoro-2-thiouridine-3′-phosphate (U3f), and 2-amino-2′-O-methyladenosine-3′-phosphate (al). In some instances, the guide strand comprises a nucleic acid sequence of 5′-mFmmmFXmmmmFmFmFmmmmmmm-3′, wherein m is 2′-O-methyl modified nucleotide, F is 2′-F modified nucleotide, and X is selected from acyclic L-threoninol nucleic acid-thymine-3′-phosphate (T-T), acyclic L-threoninol nucleic acid-adenine-3′-phosphate (T-A), acyclic N-acetyl L-threoninol abasic nucleic acid-3′phosphate (T-NAc), 1′,2′-Dideoxyribose-3′-phosphate (dAB), and thymidine-glycol nucleic acid (GNA)S-isomer (Tgn).

[0225] In some instances, the guide strand comprises a nucleic acid sequence of 5′-mFmmmmXFmmmFmFmFmmmmmmm-3′, wherein m is 2′-O-methyl modified nucleotide, F is 2′-F modified nucleotide, and X is selected from acyclic L-threoninol nucleic acid-thymine-3′-phosphate (T-T), acyclic L-threoninol nucleic acid-adenine-3′-phosphate (T-A), acyclic N-acetyl L-threoninol abasic nucleic acid-3′phosphate (T-NAc), 1′,2′-Dideoxyribose-3′-phosphate (dAB), thymidine-glycol nucleic acid (GNA)S-isomer (Tgn), 2′-O-methyl-2-thiouridine-3′-phosphate (u3), 2′-fluoro-2-thiouridine-3′-phosphate (U3f), and 2-amino-2′-O-methyladenosine-3′-phosphate (al). In some instances, the guide strand comprises a nucleic acid sequence of 5′-mFmmmmXFmmmFmFmFmmmmmmm-3′, wherein m is 2′-O-methyl modified nucleotide, F is 2′-F modified nucleotide, and X is selected from acyclic L-threoninol nucleic acid-thymine-3′-phosphate (T-T), acyclic L-threoninol nucleic acid-adenine-3′-phosphate (T-A), acyclic N-acetyl L-threoninol abasic nucleic acid-3′phosphate (T-NAc), 1′,2′-Dideoxyribose-3′-phosphate (dAB), and thymidine-glycol nucleic acid (GNA)S-isomer (Tgn).

[0226] In some instances, the guide strand comprises a nucleic acid sequence of 5′-mFmmmmFXmmmFmFmFmmmmmmm-3′, wherein m is 2′-O-methyl modified nucleotide, F is 2′-F modified nucleotide, and X is selected from acyclic L-threoninol nucleic acid-thymine-3′-phosphate (T-T), acyclic L-threoninol nucleic acid-adenine-3′-phosphate (T-A), acyclic N-acetyl L-threoninol abasic nucleic acid-3′phosphate (T-NAc), 1′,2′-Dideoxyribose-3′-phosphate (dAB), thymidine-glycol nucleic acid (GNA)S-isomer (Tgn), 2′-O-methyl-2-thiouridine-3′-phosphate (u3), 2′-fluoro-2-thiouridine-3′-phosphate (U3f), and 2-amino-2′-O-methyladenosine-3′-phosphate (al). In some instances, the guide strand comprises a nucleic acid sequence of 5′-mFmmmmFXmmmFmFmFmmmmmmm-3′, wherein m is 2′-O-methyl modified nucleotide, F is 2′-F modified nucleotide, and X is selected from acyclic L-threoninol nucleic acid-thymine-3′-phosphate (T-T), acyclic L-threoninol nucleic acid-adenine-3′-phosphate (T-A), acyclic N-acetyl L-threoninol abasic nucleic acid-3′phosphate (T-NAc), 1′,2′-Dideoxyribose-3′-phosphate (dAB), and thymidine-glycol nucleic acid (GNA)S-isomer (Tgn).

[0227] In some instances, the guide strand comprises 2′-O-methyl modified nucleotide, 2′-F modified nucleotide, nucleotide analogue described herein, or phophorothioate intemucleotide linkage. In some instances, the guide strand comprises one or more phosphorothioate modified intemucleotide linkages at the 5′ end and one or more phosphorothioate modified intemucleotide linkages at the 3′ end. In some instances, the guide strand comprises two phosphorothioate modified intemucleotide linkages at the 5′ end and two phosphorothioate modified intemucleotide linkages at the 3′ end. In some instances, the guide strand comprises a nucleic acid sequence of 5′-msFsmmmXFmmmmFmFmFmmmmmsmsm-3′, wherein m is 2′-O-methyl modified nucleotide, F is 2′-F modified nucleotide, s is phophorothioate intemucleotide linkage, and X is selected from acyclic L-threoninol nucleic acid-thymine-3′-phosphate (T-T), acyclic L-threoninol nucleic acid-adenine-3′-phosphate (T-A), acyclic N-acetyl L-threoninol abasic nucleic acid-3′phosphate (T-NAc), 1′,2′-Dideoxyribose-3′-phosphate (dAB), thymidine-glycol nucleic acid (GNA)S-isomer (Tgn), 2′-O-methyl-2-thiouridine-3′-phosphate (u3), 2′-fluoro-2-thiouridine-3′-phosphate (U3f), and 2-amino-2′-O-methyladenosine-3′-phosphate (al).

[0228] In some instances, the guide strand comprises a nucleic acid sequence of 5′-msFsmmmXFmmmmFmFmFmmmmmsmsm-3′, wherein m is 2′-O-methyl modified nucleotide, F is 2′-F modified nucleotide, s is phophorothioate intemucleotide linkage, and X is selected from acyclic L-threoninol nucleic acid-thymine-3′-phosphate (T-T), acyclic L-threoninol nucleic acid-adenine-3′-phosphate (T-A), acyclic N-acetyl L-threoninol abasic nucleic acid-3′phosphate (T-NAc), 1′,2′-Dideoxyribose-3′-phosphate (dAB), and thymidine-glycol nucleic acid (GNA)S-isomer (Tgn).

[0229] In some instances, the guide strand comprises a nucleic acid sequence of 5′-msFsmmmmXmmmmFmFmFmmmmmsmsm-3′, wherein m is 2′-O-methyl modified nucleotide, F is 2′-F modified nucleotide, s is phophorothioate intemucleotide linkage, and X is selected from acyclic L-threoninol nucleic acid-thymine-3′-phosphate (T-T), acyclic L-threoninol nucleic acid-adenine-3′-phosphate (T-A), acyclic N-acetyl L-threoninol abasic nucleic acid-3′phosphate (T-NAc), 1′,2′-Dideoxyribose-3′-phosphate (dAB), thymidine-glycol nucleic acid (GNA)S-isomer (Tgn), 2′-O-methyl-2-thiouridine-3′-phosphate (u3), 2′-fluoro-2-thiouridine-3′-phosphate (U3), and 2-amino-2′-O-methyladenosine-3′-phosphate (al). In some instances, the guide strand comprises a nucleic acid sequence of 5′-msFsmmmmXmmmmFmFmFmmmmmsmsm-3′, wherein m is 2′-O-methyl modified nucleotide, F is 2′-F modified nucleotide, s is phophorothioate intemucleotide linkage, and X is selected from acyclic L-threoninol nucleic acid-thymine-3′-phosphate (T-T), acyclic L-threoninol nucleic acid-adenine-3′-phosphate (T-A), acyclic N-acetyl L-threoninol abasic nucleic acid-3′phosphate (T-NAc), 1′,2′-Dideoxyribose-3′-phosphate (dAB), and thymidine-glycol nucleic acid (GNA)S-isomer (Tgn).

[0230] In some instances, the guide strand comprises a nucleic acid sequence of 5′-msFsmmmmFXmmmFmFmFmmmmmsmsm-3′, wherein m is 2′-O-methyl modified nucleotide, F is 2′-F modified nucleotide, s is phophorothioate intemucleotide linkage, and X is selected from acyclic L-threoninol nucleic acid-thymine-3′-phosphate (T-T), acyclic L-threoninol nucleic acid-adenine-3′-phosphate (T-A), acyclic N-acetyl L-threoninol abasic nucleic acid-3′phosphate (T-NAc), 1′,2′-Dideoxyribose-3′-phosphate (dAB), thymidine-glycol nucleic acid (GNA)S-isomer (Tgn), 2′-O-methyl-2-thiouridine-3′-phosphate (u3), 2′-fluoro-2-thiouridine-3′-phosphate (U3), and 2-amino-2′-O-methyladenosine-3′-phosphate (al). In some instances, the guide strand comprises a nucleic acid sequence of 5′-msFsmmmmFXmmmFmFmFmmmmmsmsm-3′, wherein m is 2′-O-methyl modified nucleotide, F is 2′-F modified nucleotide, s is phophorothioate intemucleotide linkage, and X is selected from acyclic L-threoninol nucleic acid-thymine-3′-phosphate (T-T), acyclic L-threoninol nucleic acid-adenine-3′-phosphate (T-A), acyclic N-acetyl L-threoninol abasic nucleic acid-3′phosphate (T-NAc), 1′,2′-Dideoxyribose-3′-phosphate (dAB), and thymidine-glycol nucleic acid (GNA)S-isomer (Tgn).

[0231] In some instances, the nucleotide analogue is located at at least one of positions 2-12 from the 5′ end of the guide strand, and the nucleotide analogue comprises 2′-O-methyl-2-thiouridine-3′-phosphate (u3) or 2′-fluoro-2-thiouridine-3′-phosphate (U3f). In some instances, the nucleotide analogue that is located at position 12 of the 5′ end of the guide strand, and the nucleotide analogue consists of 2′-fluoro-2-thiouridine-3′-phosphate (U3). In some instances, the nucleotide analogue is located at position 3 of the 5′ end of the guide strand, and the nucleotide analogue comprises 2′-O-methyl-2-thiouridine-3′-phosphate (u3). In some instances, the nucleotide analogue is located at position 3 of the 5′ end of the guide strand, and the nucleotide analogue consists of 2′-O-methyl-2-thiouridine-3′-phosphate (u3). In some instances, the guide strand comprises a nucleic acid sequence of 5′-mFmmmmFXmmmF′mFmFmmmmmmm-3′, where m is 2′-O-methyl modified nucleotide, F is 2′-F modified nucleotide, X is selected from acyclic L-threoninol nucleic acid-thymine-3′-phosphate (T-T), acyclic N-acetyl L-threoninol abasic nucleic acid-3′phosphate (T-NAc), 1′,2′-Dideoxyribose-3′-phosphate (dAB), and thymidine-glycol nucleic acid (GNA)S-isomer (Tgn), and F′ is 2′-fluoro-2-thiouridine-3′-phosphate (U3f). In some instances, the guide strand comprises a nucleic acid sequence of 5′-msFsmmmmFXmmmF′mFmFmmmmmsmsm-3′, where m is 2′-O-methyl modified nucleotide, F is 2′-F modified nucleotide, s is phophorothioate intemucleotide linkage, X is selected from acyclic L-threoninol nucleic acid-thymine-3′-phosphate (T-T), acyclic N-acetyl L-threoninol abasic nucleic acid-3′phosphate (T-NAc), 1′,2′-Dideoxyribose-3′-phosphate (dAB), and thymidine-glycol nucleic acid (GNA)S-isomer (Tgn), and F′ is 2′-fluoro-2-thiouridine-3′-phosphate (U3f). In some instances, the guide strand comprises a nucleic acid sequence of 5′-mFXmmmFmmmmFmFmFmmmmmmm-3′, where m is 2′-O-methyl modified nucleotide, F is 2′-F modified nucleotide, and X is 2′-O-methyl-2-thiouridine-3′-phosphate (u3). In some instances, the guide strand comprises a nucleic acid sequence of 5′-msFsXmmmFmmmmFmFmFmmmmmsmsm-3′, where m is 2′-O-methyl modified nucleotide, F is 2′-F modified nucleotide, s is phophorothioate intemucleotide linkage, and X is 2′-O-methyl-2-thiouridine-3′-phosphate (u3).

[0232] In some aspects, described herein is a specific modification motif of pattern for the double-stranded polynucleic acid molecule comprising a passenger strand and an guide strand. In some aspects, described herein is a specific modification pattern of the passenger strand.

[0233] In some instances, the passenger strand comprises one or more nucleotide analogue. In some instances, the passenger strand comprises one or more nucleotide analogue at locations opposite to the seed region of the guide strand. In some instances, the passenger strand comprises one or more nucleotide analogue at locations 12-22 from the 5′ end. In some instances, the passenger strand comprises one or more nucleotide analogue at locations 2-10 from the 3′ end. In some instances, the passenger strand comprises one or more 2-amino-2′-O-methyladenosine-3′-phosphate (al). In some instances, the passenger strand comprises 2-amino-2′-O-methyladenosine-3′-phosphate (al) at location 11, 12, 13, 14, or 15 from the 5′ end. In some instances, the passenger strand comprises 2-amino-2′-O-methyladenosine-3′-phosphate (al) at location 13 from the 5′ end. In some instances, the passenger strand comprises 2-amino-2′-O-methyladenosine-3′-phosphate (al) at location 14 from the 5′ end. In some instances, the passenger strand comprises 2-amino-2′-O-methyladenosine-3′-phosphate (al) at location 15 from the 5′ end.

[0234] In some instances, the passenger strand comprises at least one, at least two, at least three, at least four, at least five, at least six, at least seven, or at least eight 2′-fluoro (2′-F) modified nucleotides. In some instances, the passenger strand comprises at least two, at least three, or at least four 2′-F modified nucleotides. In some instances, the passenger strand comprises at most one, at most two, at most three, at most four, at most five, at most six, at most seven, or at most eight 2′-fluoro (2′-F) modified nucleotides. In some instances, the passenger strand comprises from one to eight, from two to eight, from three to eight, from four to eight, from five to eight, from six to eight, or from seven to eight 2′-fluoro (2′-F) modified nucleotides. In some instances, the passenger strand comprises one, two, three, four, five, six, seven, or eight 2′-fluoro (2′-F) modified nucleotides. In some instances, the passenger strand comprises one 2′-F modified nucleotides. In some instances, the passenger strand comprises two 2′-F modified nucleotides. In some instances, the passenger strand comprises three 2′-F modified nucleotides. In some instances, the passenger strand comprises four 2′-F modified nucleotides. In some instances, the passenger strand comprises five 2′-F modified nucleotides.

[0235] In some aspects, the passenger strand comprises a 2′-fluoro modified nucleotide at position 7 from the 5′ end. In some aspects, the passenger strand comprises a 2′-fluoro modified nucleotide at position 9 from the 5′ end. In some aspects, the passenger strand comprises 2′-fluoro modified nucleotides at position 11 from the 5′ end. In some aspects, the passenger strand comprises a 2′-fluoro modified nucleotide at at least one of positions 7, 9, and 11 from the 5′ end. In some aspects, the passenger strand comprises a 2′-fluoro modified nucleotide at positions 7, 9, 11, or combination thereof from the 5′ end. In some aspects, the passenger strand comprises a 2′-fluoro modified nucleotide at positions 7, 9, and 11 from the 5′ end.

[0236] In some instances, the nucleotides of the passenger strand comprises DNA nucleotide or RNA nucleotide. As described herein, in some instances, the DNA nucleotide comprises an unmodified DNA nucleotide comprising: an unmodified adenine nucleotide (A), an unmodified guanine nucleotide (G), an unmodified thymine nucleotide (T), or an unmodified cytosine nucleotide (C). As described herein, in some instances, the RNA nucleotide comprises an unmodified RNA nucleotide comprising: an unmodified adenine nucleotide (A), an unmodified guanine nucleotide (G), an unmodified uracil nucleotide (U), or an unmodified cytosine nucleotide (C).

[0237] In some instances, the nucleotides of the passenger strand comprises the DNA nucleotide, RNA nucleotide, nucleotide analogue, 2′-F modified nucleotide, or 2′-O-alkyl modified nucleotide. In some instances, the 2′-O-alkly modified nucleotide comprises 2′-O-methyl modified nucleotides. In some instances, the nucleotides of the passenger strand that are not the nucleotide analogue or 2′-F modified nucleotide are selected from 2′-O-alkyl modified nucleotide, 2′-alkoxy modified nucleotide, 2′-alkyl modified nucleotide, 2′-halo modified nucleotide, DNA nucleotide, RNA nucleotide, ENA, BNA, LNA, and UNA. In some instances, the nucleotides in the passenger strand that are not 2′-F modified nucleotide are 2′-O-methyl modified nucleotides.

[0238] In some instances, the passenger strand comprises at least one, at least two, at least three, at least four, at least five, at least six, at least seven, or at least eight phosphorothioate modified intemucleotide linkages. In some instances, the passenger strand comprises at least two, at least three, or at least four phosphorothioate modified intemucleotide linkages. In some instances, the passenger strand comprises at least one phosphorothioate modified intemucleotide linkage. In some instances, the passenger strand comprises at most one, at most two, at most three, at most four, at most five, at most six, at most seven, or at most eight phosphorothioate modified intemucleotide linkages. In some instances, the passenger strand comprises one, two, three, four, five, six, seven, or eight phosphorothioate modified intemucleotide linkages. In some instances, the passenger strand comprises from 1 to 8, from 2 to 8, from 3 to 8, from 4 to 8, from 5 to 8, or from 6 to 8 phosphorothioate modified intemucleotide linkages. In some instances, the passenger strand comprises from 1 to 4, from 2 to 4, or from 3 to 4 phosphorothioate modified intemucleotide linkages.

[0239] In some instances, the passenger strand comprises at least one, at least two, at least three, or at least four phosphorothioate modified intemucleotide linkage at the 5′ end. In some instances, the passenger strand comprises at least one phosphorothioate modified intemucleotide linkage at the 5′ end. In some instances, the passenger strand comprises at least one, at least two, at least three, or at least four phosphorothioate modified intemucleotide linkage at the 3′ end. In some instances, the passenger strand comprises at least one phosphorothioate modified intemucleotide linkage at the 3′ end.

[0240] In some instances, the passenger strand comprises one phosphorothioate modified intemucleotide linkage at the 5′ end. In some instances, the passenger strand comprises two phosphorothioate modified intemucleotide linkage at the 5′ end. In some instances, the passenger strand comprises three phosphorothioate modified intemucleotide linkage at the 5′ end. In some instances, the passenger strand comprises four phosphorothioate modified intemucleotide linkage at the 5′ end.

[0241] In some instances, the passenger strand comprises one phosphorothioate modified intemucleotide linkage at the 3′ end. In some instances, the passenger strand comprises two phosphorothioate modified intemucleotide linkage at the 3′ end. In some instances, the passenger strand comprises three phosphorothioate modified intemucleotide linkage at the 3′ end. In some instances, the passenger strand comprises four phosphorothioate modified intemucleotide linkage at the 3′ end.

[0242] In some instances, the passenger strand comprises one phosphorothioate modified intemucleotide linkages at the 5 end and one phosphorothioate modified intemucleotide linkages at the 3′ end. In some instances, the passenger strand comprises two phosphorothioate modified intemucleotide linkages at the 5′ end and two phosphorothioate modified intemucleotide linkages at the 3′ end. In some instances, the passenger strand comprises three phosphorothioate modified intemucleotide linkages at the 5′ end and three phosphorothioate modified intemucleotide linkages at the 3′ end. In some instances, the passenger strand comprises four phosphorothioate modified intemucleotide linkages at the 5′ end and four phosphorothioate modified intemucleotide linkages at the 3′ end.

[0243] In some aspects, described herein is a specific modification pattern for a double-stranded polynucleic nucleic acid molecule comprising a passenger strand and an guide strand. In some instances, the guide strand comprises a nucleic acid sequence of mFmmmXFmmmmFmFmFmmmmmmm, and the passenger strand comprises mmmmmmFmFmFmmmmmmmmmm, wherein m is 2′-O-methyl modified nucleotide, F is 2′-F modified nucleotide, and X is selected from acyclic L-threoninol nucleic acid-thymine-3′-phosphate (T-T), acyclic L-threoninol nucleic acid-adenine-3′-phosphate (T-A), acyclic N-acetyl L-threoninol abasic nucleic acid-3′phosphate (T-NAc), 1′,2′-Dideoxyribose-3′-phosphate (dAB), thymidine-glycol nucleic acid (GNA)S-isomer (Tgn), 2′-O-methyl-2-thiouridine-3′-phosphate (u3), 2′-fluoro-2-thiouridine-3′-phosphate (U3f), or 2-amino-2′-O-methyladenosine-3′-phosphate (al). In some instances, the guide strand comprises a nucleic acid sequence of 5′-mFmmmXFmmmmFmFmFmmmmmmm-3′, and the passenger strand comprises mmmmmmFmFmFmmmmmmmmmm, wherein m is 2′-O-methyl modified nucleotide, F is 2′-F modified nucleotide, and X is selected from acyclic L-threoninol nucleic acid-thymine-3′-phosphate (T-T), acyclic L-threoninol nucleic acid-adenine-3′-phosphate (T-A), acyclic N-acetyl L-threoninol abasic nucleic acid-3′phosphate (T-NAc), 1′,2′-Dideoxyribose-3′-phosphate (dAB), and thymidine-glycol nucleic acid (GNA)S-isomer (Tgn). In some instances, the guide strand comprises a nucleic acid sequence of 5′-mFmmmXFmmmmFmFmFmmmmmmm-3′, and the passenger strand comprises 5′-mmmmmmFmFmFmmX′mmmmmmm-3′, wherein m is 2′-O-methyl modified nucleotide, F is 2′-F modified nucleotide, and X is selected from acyclic L-threoninol nucleic acid-thymine-3′-phosphate (T-T), acyclic L-threoninol nucleic acid-adenine-3′-phosphate (T-A), acyclic N-acetyl L-threoninol abasic nucleic acid-3′phosphate (T-NAc), 1′,2′-Dideoxyribose-3′-phosphate (dAB), and thymidine-glycol nucleic acid (GNA)S-isomer (Tgn), and X′ is 2-amino-2′-O-methyladenosine-3′-phosphate (al). In some instances, the guide strand comprises a nucleic acid sequence of 5′-mFmmmXFmmmmFmFmFmmmmmmm-3′, and the passenger strand comprises 5′-mmmmmmFmFmFmmmX′mmmmmm-3′, wherein m is 2′-O-methyl modified nucleotide, F is 2′-F modified nucleotide, and X is selected from acyclic L-threoninol nucleic acid-thymine-3′-phosphate (T-T), acyclic L-threoninol nucleic acid-adenine-3′-phosphate (T-A), acyclic N-acetyl L-threoninol abasic nucleic acid-3′phosphate (T-NAc), 1′,2′-Dideoxyribose-3′-phosphate (dAB), and thymidine-glycol nucleic acid (GNA)S-isomer (Tgn), and X′ is 2-amino-2′-O-methyladenosine-3′-phosphate (al).

[0244] In some instances, the guide strand comprises a nucleic acid sequence of 5′-msFsmmmXFmmmmFmFmFmmmmmsmsm-3′, and the passenger strand comprises 5′-msmsmmmmFmFmFmmmmmmmmmm-3′, wherein m is 2′-O-methyl modified nucleotide, F is 2′-F modified nucleotide, and X is selected from acyclic L-threoninol nucleic acid-thymine-3′-phosphate (T-T), acyclic L-threoninol nucleic acid-adenine-3′-phosphate (T-A), acyclic N-acetyl L-threoninol abasic nucleic acid-3′phosphate (T-NAc), 1′,2′-Dideoxyribose-3′-phosphate (dAB), thymidine-glycol nucleic acid (GNA)S-isomer (Tgn), 2′-O-methyl-2-thiouridine-3′-phosphate (u3), 2′-fluoro-2-thiouridine-3′-phosphate (U3f), or 2-amino-2′-O-methyladenosine-3′-phosphate (al). In some instances, the guide strand comprises a nucleic acid sequence of 5′-msFsmmmXFmmmmFmFmFmmmmmsmsm-3′, and the passenger strand comprises 5′-msmsmmmmFmFmFmmmmmmmmmm-3′, wherein m is 2′-O-methyl modified nucleotide, F is 2′-F modified nucleotide, and X is selected from acyclic L-threoninol nucleic acid-thymine-3′-phosphate (T-T), acyclic L-threoninol nucleic acid-adenine-3′-phosphate (T-A), acyclic N-acetyl L-threoninol abasic nucleic acid-3′phosphate (T-NAc), 1′,2′-Dideoxyribose-3′-phosphate (dAB), and thymidine-glycol nucleic acid (GNA)S-isomer (Tgn). In some instances, the guide strand comprises a nucleic acid sequence of 5′-msFsmmmXFmmmmFmFmFmmmmmsmsm-3′, and the passenger strand comprises 5′-msmsmmmmFmFmFmmX′mmmmmmm-3′, wherein m is 2′-O-methyl modified nucleotide, F is 2′-F modified nucleotide, and X is selected from acyclic L-threoninol nucleic acid-thymine-3′-phosphate (T-T), acyclic L-threoninol nucleic acid-adenine-3′-phosphate (T-A), acyclic N-acetyl L-threoninol abasic nucleic acid-3′phosphate (T-NAc), 1′,2′-Dideoxyribose-3′-phosphate (dAB), and thymidine-glycol nucleic acid (GNA)S-isomer (Tgn), and X′ is 2-amino-2′-O-methyladenosine-3′-phosphate (al). In some instances, the guide strand comprises a nucleic acid sequence of 5′-msFsmmmXFmmmmFmFmFmmmmmsmsm-3′, and the passenger strand comprises 5′-msmsmmmmFmFmFmmmX′mmmmmm-3′, wherein m is 2′-O-methyl modified nucleotide, F is 2′-F modified nucleotide, and X is selected from acyclic L-threoninol nucleic acid-thymine-3′-phosphate (T-T), acyclic L-threoninol nucleic acid-adenine-3′-phosphate (T-A), acyclic N-acetyl L-threoninol abasic nucleic acid-3′phosphate (T-NAc), 1′,2′-Dideoxyribose-3′-phosphate (dAB), and thymidine-glycol nucleic acid (GNA)S-isomer (Tgn), and X′ is 2-amino-2′-O-methyladenosine-3′-phosphate (al).

[0245] In some instances, the guide strand comprises a nucleic acid sequence of 5′-mFmmmmXmmmmFmFmFmmmmmmm-3′, and the passenger strand comprises 5′-mmmmmmFmFmFmmmmmmmmmm-3′, wherein m is 2′-O-methyl modified nucleotide, F is 2′-F modified nucleotide, and X is selected from acyclic L-threoninol nucleic acid-thymine-3′-phosphate (T-T), acyclic L-threoninol nucleic acid-adenine-3′-phosphate (T-A), acyclic N-acetyl L-threoninol abasic nucleic acid-3′phosphate (T-NAc), 1′,2′-Dideoxyribose-3′-phosphate (dAB), thymidine-glycol nucleic acid (GNA)S-isomer (Tgn), 2′-O-methyl-2-thiouridine-3′-phosphate (u3), 2′-fluoro-2-thiouridine-3′-phosphate (U3f), or 2-amino-2′-O-methyladenosine-3′-phosphate (al). In some instances, the guide strand comprises a nucleic acid sequence of 5′-mFmmmmXmmmmFmFmFmmmmmmm-3′, and the passenger strand comprises 5′-mmmmmmFmFmFmmmmmmmmmm-3′, wherein m is 2′-O-methyl modified nucleotide, F is 2′-F modified nucleotide, and X is selected from acyclic L-threoninol nucleic acid-thymine-3′-phosphate (T-T), acyclic L-threoninol nucleic acid-adenine-3′-phosphate (T-A), acyclic N-acetyl L-threoninol abasic nucleic acid-3′phosphate (T-NAc), 1′,2′-Dideoxyribose-3′-phosphate (dAB), and thymidine-glycol nucleic acid (GNA)S-isomer (Tgn). In some instances, the guide strand comprises a nucleic acid sequence of 5′-mFmmmmXmmmmFmFmFmmmmmmm-3′, and the passenger strand comprises 5′-msmsmmmmFmFmFmmX′mmmmmmm-3′, wherein m is 2′-O-methyl modified nucleotide, F is 2′-F modified nucleotide, and X is selected from acyclic L-threoninol nucleic acid-thymine-3′-phosphate (T-T), acyclic L-threoninol nucleic acid-adenine-3′-phosphate (T-A), acyclic N-acetyl L-threoninol abasic nucleic acid-3′phosphate (T-NAc), 1′,2′-Dideoxyribose-3′-phosphate (dAB), and thymidine-glycol nucleic acid (GNA)S-isomer (Tgn), and X′ is 2-amino-2′-O-methyladenosine-3′-phosphate (al). In some instances, the guide strand comprises a nucleic acid sequence of 5′-mFmmmmXmmmmFmFmFmmmmmmm-3′, and the passenger strand comprises 5′-msmsmmmmFmFmFmmmX′mmmmmm-3′, wherein m is 2′-O-methyl modified nucleotide, F is 2′-F modified nucleotide, and X is selected from acyclic L-threoninol nucleic acid-thymine-3′-phosphate (T-T), acyclic L-threoninol nucleic acid-adenine-3′-phosphate (T-A), acyclic N-acetyl L-threoninol abasic nucleic acid-3′phosphate (T-NAc), 1′,2′-Dideoxyribose-3′-phosphate (dAB), and thymidine-glycol nucleic acid (GNA)S-isomer (Tgn), and X′ is 2-amino-2′-O-methyladenosine-3′-phosphate (al).

[0246] In some instances, the guide strand comprises a nucleic acid sequence of 5′-msFsmmmmXmmmmFmFmFmmmmmsmsm-3′, and the passenger strand comprises 5′-msmsmmmmFmFmFmmmmmmmmmm-3′, wherein m is 2′-O-methyl modified nucleotide, F is 2′-F modified nucleotide, s is phosphorothioate intemucleotide linkage, and X is selected from acyclic L-threoninol nucleic acid-thymine-3′-phosphate (T-T), acyclic L-threoninol nucleic acid-adenine-3′-phosphate (T-A), acyclic N-acetyl L-threoninol abasic nucleic acid-3′phosphate (T-NAc), 1′,2′-Dideoxyribose-3′-phosphate (dAB), thymidine-glycol nucleic acid (GNA)S-isomer (Tgn), 2′-O-methyl-2-thiouridine-3′-phosphate (u3), 2′-fluoro-2-thiouridine-3′-phosphate (U3f), or 2-amino-2′-O-methyladenosine-3′-phosphate (al). In some instances, the guide strand comprises a nucleic acid sequence of 5′-msFsmmmmXmmmmFmFmFmmmmmsmsm-3′, and the passenger strand comprises 5′-msmsmmmmFmFmFmmmmmmmmmm-3′, wherein m is 2′-O-methyl modified nucleotide, F is 2′-F modified nucleotide, s is phosphorothioate internucleotide linkage, and X is selected from acyclic L-threoninol nucleic acid-thymine-3′-phosphate (T-T), acyclic L-threoninol nucleic acid-adenine-3′-phosphate (T-A), acyclic N-acetyl L-threoninol abasic nucleic acid-3′phosphate (T-NAc), 1′,2′-Dideoxyribose-3′-phosphate (dAB), and thymidine-glycol nucleic acid (GNA)S-isomer (Tgn). In some instances, the guide strand comprises a nucleic acid sequence of 5′-msFsmmmmXmmmmFmFmFmmmmmsmsm-3′, and the passenger strand comprises 5′-msmsmmmmFmFmFmmX′mmmmmmm-3′, wherein m is 2′-O-methyl modified nucleotide, F is 2′-F modified nucleotide, and X is selected from acyclic L-threoninol nucleic acid-thymine-3′-phosphate (T-T), acyclic L-threoninol nucleic acid-adenine-3′-phosphate (T-A), acyclic N-acetyl L-threoninol abasic nucleic acid-3′phosphate (T-NAc), 1′,2′-Dideoxyribose-3′-phosphate (dAB), and thymidine-glycol nucleic acid (GNA)S-isomer (Tgn), and X′ is 2-amino-2′-O-methyladenosine-3′-phosphate (al). In some instances, the guide strand comprises a nucleic acid sequence of 5′-msFsmmmmXmmmmFmFmFmmmmmsmsm-3′, and the passenger strand comprises 5′-msmsmmmmFmFmFmmmX′mmmmmm-3′, wherein m is 2′-O-methyl modified nucleotide, F is 2′-F modified nucleotide, and X is selected from acyclic L-threoninol nucleic acid-thymine-3′-phosphate (T-T), acyclic L-threoninol nucleic acid-adenine-3′-phosphate (T-A), acyclic N-acetyl L-threoninol abasic nucleic acid-3′phosphate (T-NAc), 1′,2′-Dideoxyribose-3′-phosphate (dAB), and thymidine-glycol nucleic acid (GNA)S-isomer (Tgn), and X′ is 2-amino-2′-O-methyladenosine-3′-phosphate (al).

[0247] In some instances, the guide strand comprises a nucleic acid sequence of 5′-mFmmmmFXmmmFmFmFmmmmmmm-3′, and the passenger strand comprises 5′-mmmmmmFmFmFmmmmmmmmmm-3′, wherein m is 2′-O-methyl modified nucleotide, F is 2′-F modified nucleotide, and X is selected from acyclic L-threoninol nucleic acid-thymine-3′-phosphate (T-T), acyclic L-threoninol nucleic acid-adenine-3′-phosphate (T-A), acyclic N-acetyl L-threoninol abasic nucleic acid-3′phosphate (T-NAc), 1′,2′-Dideoxyribose-3′-phosphate (dAB), thymidine-glycol nucleic acid (GNA)S-isomer (Tgn), 2′-O-methyl-2-thiouridine-3′-phosphate (u3), 2′-fluoro-2-thiouridine-3′-phosphate (U3f), or 2-amino-2′-O-methyladenosine-3′-phosphate (al). In some instances, the guide strand comprises a nucleic acid sequence of 5′-mFmmmmFXmmmFmFmFmmmmmmm-3′, and the passenger strand comprises 5′-mmmmmmFmFmFmmmmmmmmmm-3′, wherein m is 2′-O-methyl modified nucleotide, F is 2′-F modified nucleotide, and X is selected from acyclic L-threoninol nucleic acid-thymine-3′-phosphate (T-T), acyclic L-threoninol nucleic acid-adenine-3′-phosphate (T-A), acyclic N-acetyl L-threoninol abasic nucleic acid-3′phosphate (T-NAc), 1′,2′-Dideoxyribose-3′-phosphate (dAB), and thymidine-glycol nucleic acid (GNA)S-isomer (Tgn). In some instances, the guide strand comprises a nucleic acid sequence of 5′-mFmmmmFXmmmFmFmFmmmmmmm-3′, and the passenger strand comprises 5′-msmsmmmmFmFmFmmX′mmmmmmm-3′, wherein m is 2′-O-methyl modified nucleotide, F is 2′-F modified nucleotide, and X is selected from acyclic L-threoninol nucleic acid-thymine-3′-phosphate (T-T), acyclic L-threoninol nucleic acid-adenine-3′-phosphate (T-A), acyclic N-acetyl L-threoninol abasic nucleic acid-3′phosphate (T-NAc), 1′,2′-Dideoxyribose-3′-phosphate (dAB), and thymidine-glycol nucleic acid (GNA)S-isomer (Tgn), and X′ is 2-amino-2′-O-methyladenosine-3′-phosphate (al). In some instances, the guide strand comprises a nucleic acid sequence of 5′-mFmmmmFXmmmFmFmFmmmmmmm-3′, and the passenger strand comprises 5′-msmsmmmmFmFmFmmmX′mmmmmm-3′, wherein m is 2′-O-methyl modified nucleotide, F is 2′-F modified nucleotide, and X is selected from acyclic L-threoninol nucleic acid-thymine-3′-phosphate (T-T), acyclic L-threoninol nucleic acid-adenine-3′-phosphate (T-A), acyclic N-acetyl L-threoninol abasic nucleic acid-3′phosphate (T-NAc), 1′,2′-Dideoxyribose-3′-phosphate (dAB), and thymidine-glycol nucleic acid (GNA)S-isomer (Tgn), and X′ is 2-amino-2′-O-methyladenosine-3′-phosphate (al).

[0248] In some instances, the guide strand comprises a nucleic acid sequence of 5′-msFsmmmmFXmmmFmFmFmmmmmsmsm-3′, and the passenger strand comprises 5′-msmsmmmmFmFmFmmmmmmmmmm-3′, wherein m is 2′-O-methyl modified nucleotide, F is 2′-F modified nucleotide, s is phosphorothioate internucleotide linkage, and X is selected from acyclic L-threoninol nucleic acid-thymine-3′-phosphate (T-T), acyclic L-threoninol nucleic acid-adenine-3′-phosphate (T-A), acyclic N-acetyl L-threoninol abasic nucleic acid-3′phosphate (T-NAc), 1′,2′-Dideoxyribose-3′-phosphate (dAB), thymidine-glycol nucleic acid (GNA)S-isomer (Tgn), 2′-O-methyl-2-thiouridine-3′-phosphate (u3), 2′-fluoro-2-thiouridine-3′-phosphate (U3f), or 2-amino-2′-O-methyladenosine-3′-phosphate (al). In some instances, the guide strand comprises a nucleic acid sequence of 5′-msFsmmmmFXmmmFmFmFmmmmmsmsm-3′, and the passenger strand comprises 5′-msmsmmmmFmFmFmmmmmmmmmm-3′, wherein m is 2′-O-methyl modified nucleotide, F is 2′-F modified nucleotide, s is phosphorothioate internucleotide linkage, and X is selected from acyclic L-threoninol nucleic acid-thymine-3′-phosphate (T-T), acyclic L-threoninol nucleic acid-adenine-3′-phosphate (T-A), acyclic N-acetyl L-threoninol abasic nucleic acid-3′phosphate (T-NAc), 1′,2′-Dideoxyribose-3′-phosphate (dAB), and thymidine-glycol nucleic acid (GNA)S-isomer (Tgn). In some instances, the guide strand comprises a nucleic acid sequence of 5′-msFsmmmmFXmmmFmFmFmmmmmsmsm-3′, and the passenger strand comprises 5′-msmsmmmmFmFmFmmX′mmmmmmm-3′, wherein m is 2′-O-methyl modified nucleotide, F is 2′-F modified nucleotide, and X is selected from acyclic L-threoninol nucleic acid-thymine-3′-phosphate (T-T), acyclic L-threoninol nucleic acid-adenine-3′-phosphate (T-A), acyclic N-acetyl L-threoninol abasic nucleic acid-3′phosphate (T-NAc), 1′,2′-Dideoxyribose-3′-phosphate (dAB), and thymidine-glycol nucleic acid (GNA)S-isomer (Tgn), and X′ is 2-amino-2′-O-methyladenosine-3′-phosphate (al). In some instances, the guide strand comprises a nucleic acid sequence of 5′-msFsmmmmFXmmmFmFmFmmmmmsmsm-3′, and the passenger strand comprises 5′-msmsmmmmFmFmFmmmX′mmmmmm-3′, wherein m is 2′-O-methyl modified nucleotide, F is 2′-F modified nucleotide, and X is selected from acyclic L-threoninol nucleic acid-thymine-3′-phosphate (T-T), acyclic L-threoninol nucleic acid-adenine-3′-phosphate (T-A), acyclic N-acetyl L-threoninol abasic nucleic acid-3′phosphate (T-NAc), 1′,2′-Dideoxyribose-3′-phosphate (dAB), and thymidine-glycol nucleic acid (GNA)S-isomer (Tgn), and X′ is 2-amino-2′-O-methyladenosine-3′-phosphate (al).

### Conjugation

### Targeting Moiety

[0249] In certain aspects, the polynucleic acid molecule described herein is coupled or conjugated with one or more targeting moieties to form a polynucleotide-targeting moiety conjugate molecule. In some instances, a targeting moiety is selected based on its ability to target the conjugate molecule described herein to a desired cell population, tissue, or an organ selectively or preferably. In some instances, the targeting moiety targets the cell, tissue, or an organ that expresses the corresponding binding partner (e.g., either the corresponding receptor or ligand) of the targeting moiety. For example, the polynucleic acid molecule conjugated with N-acetyl galactosamine (GalNAc) can target hepatocytes expressing asialoglycoprotein (ASGP-R). A targeting moiety (i.e., an intracellular targeting moiety) that targets a desired site within the cell (e.g., endoplasmic reticulum, Golgi apparatus, nucleus, or mitochondria) may be included in the hybridized polynucleotide constructs disclosed herein. Non-limiting examples of the intracellular targeting moieties are provided in WO 2015/069932 and in WO 2015/188197; the disclosure of the intracellular targeting moieties in WO 2015/069932 and in WO 2015/188197 is incorporated herein by reference.

[0250] The polynucleic acid molecule described herein, thus, may include one or more targeting moieties selected from the group consisting of intracellular targeting moieties, extracellular targeting moieties, and combinations thereof. Thus, the inclusion of one or more targeting moieties (e.g., extracellular targeting moieties including targeting moieties independently selected from the group consisting of folate, mannose, N-acetyl galactosamine, and prostate specific membrane antigen) and one or more intracellular targeting moiety (e.g., a moiety targeting endoplasmic reticulum, Golgi apparatus, nucleus, or mitochondria) in the polynucleic acid molecule described herein can facilitate the delivery of the polynucleotides to a specific site within the specific cell population. In some aspects, the targeting moiety contains one or more mannose carbohydrates. Mannose targets the mannose receptor, which is a 175 KDa membrane-associated receptor that is expressed on sinusoidal liver cells and antigen presenting cells (e.g., macrophages and dendritic cells). It is a highly effective endocytotic/recycling receptor that binds and internalizes mannosylated pathogens and proteins (Lennartz et. al. J. Biol. Chem. 262:9942-9944,1987; Taylor et. al. J. Biol. Chem. 265:12156-62, 1990).

[0251] Some of the targeting moieties are described herein. In some aspects, the targeting moiety contains or specifically binds to a protein selected from the group including insulin, insulin-like growth factor receptor 1 (IGF1R), IGF2R, insulin-like growth factor (IGF; e.g., IGF 1 or 2), mesenchymal epithelial transition factor receptor (c-met; also known as hepatocyte growth factor receptor (HGFR)), hepatocyte growth factor (HGF), epidermal growth factor receptor (EGFR), epidermal growth factor (EGF), heregulin, fibroblast growth factor receptor (FGFR), platelet-derived growth factor receptor (PDGFR), platelet-derived growth factor (PDGF), vascular endothelial growth factor receptor (VEGFR), vascular endothelial growth factor (VEGF), tumor necrosis factor receptor (TNFR), tumor necrosis factor alpha (TNF-α), TNF-P, folate receptor (FOLR), folate, transferrin, transferrin receptor (TfR), mesothelin, Fc receptor, c-kit receptor, c-kit, an integrin (e.g., an α4 integrin or a β-1 integrin), P-selectin, sphingosine-1-phosphate receptor-1 (S1PR), hyaluronate receptor, leukocyte function antigen-1 (LFA-1), CD4, CD11, CD18, CD20, CD25, CD27, CD52, CD70, CD80, CD85, CD95 (Fas receptor), CD106 (vascular cell adhesion molecule 1 (VCAM1), CD166 (activated leukocyte cell adhesion molecule (ALCAM)), CD178 (Fas ligand), CD253 (TNF-related apoptosis-inducing ligand (TRAIL)), ICOS ligand, CCR2, CXCR3, CCR5, CXCL12 (stromal cell-derived factor 1 (SDF-1)), interleukin 1 (IL-1), IL-Ira, IL-2, IL-3, IL-4, IL-6, IL-7, IL-8, CTLA-4, MART-1, gp100, MAGE-1, ephrin (Eph) receptor, mucosal addressin cell adhesion molecule 1 (MAdCAM-1), carcinoembryonic antigen (CEA), LewisY, MUC-1, epithelial cell adhesion molecule (EpCAM), cancer antigen 125 (CA125), prostate specific membrane antigen (PSMA), TAG-72 antigen, and fragments thereof. In further aspects, the targeting moiety contains erythroblastic leukemia viral oncogene homolog (ErbB) receptor (e.g., ErbB1 receptor; ErbB2 receptor; ErbB3 receptor; and ErbB4 receptor). In some aspects, the targeting moiety contains one or more (e.g., from 1 to 6)N-acetyl galactosamines (GalNAc). In certain aspects, the targeting moiety contains one or more (e.g., from 1 to 6) mannoses. In other aspects, the targeting moiety contains a folate ligand. The folate ligand has the structure:

[chemical structure]

[0252] Certain targeting moieties may include bombesin, gastrin, gastrin-releasing peptide, tumor growth factors (TGF) (e.g., TGF-α or TGF-β), or vaccinia virus growth factor (VVGF). Non-peptidyl targeting moieties can also be used in the targeting moieties and may include, for example, steroids, carbohydrates, vitamins, and lectins. Some targeting moieties may include a polypeptide, such as somatostatin or somatostatin analog (e.g., octreotide or lanreotide), bombesin, or an antibody or antigen-binding fragment thereof. Antibodies may be of any recognized class or subclass, e.g., IgG, IgA, IgM, IgD, or IgE. Typical are those antibodies which fall within the IgG class. The antibodies can be derived from any species according techniques known in the art. Typically, however, the antibody is of human, murine, or rabbit origin. In addition, the antibody may be polyclonal or monoclonal, but is typically monoclonal.

[0253] Human or chimeric (e.g., humanized) antibodies may be used in targeting moieties. Targeting moieties may include an antigen-binding fragment of an antibody. Such antibody fragments may include, for example, the Fab′, F(ab′)2, Fv, or Fab fragments, single domain antibody, ScFv, or other antigen-binding fragments. Fc fragments may also be employed in targeting moieties. Such antibody fragments can be prepared, for example, by proteolytic enzyme digestion, for example, by pepsin or papain digestion, reductive alkylation, or recombinant techniques. The materials and methods for preparing antibody fragments are well-known to those skilled in the art. See, e.g., Parham, J. Immunology, 131:2895, 1983; Lamoyi et al., J.

### Immunological Methods, 56:235, 1983.

[0254] Other peptides for use as a targeting auxiliary moiety in polynucleic acid molecule described herein can be selected from KiSS peptides and analogs, urotensin II peptides and analogs, GnRH I and II peptides and analogs, depreotide, vapreotide, vasoactive intestinal peptide (VIP), cholecystokinin (CCK), RGD-containing peptides, melanocyte-stimulating hormone (MSH) peptide, neurotensin, calcitonin, glutathione, YIGSR (leukocyte-avid peptides, e.g., P483H, which contains the heparin-binding region of platelet factor-4 (PF-4) and a lysine-rich sequence), atrial natriuretic peptide (ANP), β-amyloid peptides, delta-opioid antagonists (such as ITIPP(psi)), annexin-V, endothelin, leukotriene B4 (LTB4), chemotactic peptides (e.g., N-formyl-methionyl-leucyl-phenylalanine-lysine (fMLFK), GP IIb/IIIa receptor antagonists (e.g., DMP444), human neutrophil elastase inhibitor (EPI-HNE-2 and EPI-HNE-4), plasmin inhibitor, antimicrobial peptides, apticide (P280 and P274), thrombospondin receptor (including analogs such as TP-1300), bitistatin, pituitary adenylyl cyclase type I receptor (PAC1), fibrin α-chain, peptides derived from phage display libraries, and conservative substitutions thereof.

[0255] One or more (e.g., from 1 to 6) targeting moieties can be linked to MOIETY or to X2 in formula (V′, V″, or V″′) through -LinkA-.

[0256] In some aspects, the targeting moiety includes one or more (e.g., from 1 to 6 or from 1 to 3) asialoglycoprotein receptor ligands (e.g., GalNAc). In some aspects, an asialoglycoprotein receptor ligand (e.g., GalNAc) is attached to -LinkA- through an anomeric carbon (e.g., where the anomeric carbon is the carbon atom in an acetal or a hemiaminal). In some aspects, an asialoglycoprotein receptor ligand (e.g., GalNAc) comprises an anomeric carbon bonded to trivalent, tetravalent linker, pentavalent, or hexavalent linker, wherein the anomeric carbon is part of a hemiaminal group. An asialoglycoprotein receptor ligand (e.g., GalNAc) attached to a linker through a hemiaminal may produce a hybridized polynucleotide construct having superior efficacy in gene silencing as compared to hybridized polynucleotide constructs having the asialoglycoprotein receptor ligand (e.g., GalNAc) attached to a linker through an acetal.

[0257] In some aspects, the linker and three asialoglycoprotein receptor targeting moieties, each of which comprises GalNAc, are as shown in Formula (V). In some instances, the conjugate described herein only comprises one asialoglycoprotein receptor targeting moiety, so the conjugate comprises a structure of Formula (V) with any two of the targeting moieties removed. In some instances, the conjugate described herein only comprises two asialoglycoprotein receptor targeting moieties, so the conjugate described herein comprises a structure of Formula (V) with any one of the targeting moieties removed.

[chemical structure]

wherein one of Y1 and Y2 is nucleotide, or wherein both Y1 and Y2 are nucleotides and Y1 and Y2 are consecutive or neighboring nucleotides from the polynucleic acid molecule described herein.

[0258] In some aspects, the linker and the targeting moieties described herein are conjugated to 3′ end of the passenger strand (e.g., as shown in Formula (V′)). In some aspects, the linker and the targeting moieties described herein are conjugated to 5′ end of the passenger strand (e.g., as shown in Formula (V″) or (V″′)). In some aspects, the linker and the targeting moieties described herein are conjugated to 3′ end of the guide strand(e.g., as shown in Formula (V′)). In some aspects, the linker and the targeting moieties described herein are conjugated to 5′ end of the guide strand (e.g., as shown in Formula (V″) or (V″′)).

[chemical structure]

wherein Z in formula (V′) corresponds to one of the sugar modifications described herein (e.g., —H, —OH, —O-Methyl, —F, or —O-methoxyethyl), and R in formula (V′) is adenine, uracil, guanine, cytosine, thymine, abasic, or others.

[chemical structure]

wherein Z in formula (V″) is a moiety that corresponds to one of the sugar modifications described herein (e.g., —H, —OH, —O-Methyl, —F, or —O-methoxyethyl) and R in formula (V″) is adenine, uracil, guanine, cytosine, thymine, abasic, or others.

[chemical structure]

wherein Z in formula (V″′) is a moiety that corresponds to one of the sugar modifications described herein (e.g., —H, —OH, —O-Methyl, —F, or —O-methoxyethyl) and R in formula (V″′) is adenine, uracil, guanine, cytosine, thymine, abasic, or others.

[chemical structure]

wherein Z in formula (V″″) is a moiety that corresponds to one of the sugar modifications described herein (e.g., —H, —OH, —O-Methyl, —F, or —O-methoxyethyl) and R in formula (V″″) is adenine, uracil, guanine, cytosine, thymine, abasic, or others.

[chemical structure]

wherein Z in formula (V″″′) is a moiety that corresponds to one of the sugar modifications described herein (e.g., —H, —OH, —O-Methyl, —F, or —O-methoxyethyl) and R in formula (V″″′) is adenine, uracil, guanine, cytosine, thymine abasic or others.

[chemical structure]

wherein Z in formula (V″″″) is a moiety that corresponds to one of the sugar modifications described herein (e.g., —H, —OH, —O-Methyl, —F, or —O-methoxyethyl) and R in formula (V″″″) is adenine, uracil, guanine, cytosine, thymine, abasic, or others.

[0259] In some instances, the 3′ end of passenger strand (sense strand) from Table 1, Table 2, Table 3, or Table 4 is conjugated with X2-GalNAc (see Formula (V), (V′), (V″), (V″′), (V″″), (V″″′), or (V″″″)). In some instances, the 5′ end of passenger strand (sense strand) from Table 1, Table 2, Table 3, or Table 4 is conjugated with X2-GalNAc (see Formula (V), (V′), (V″), (V″′), (V″″), (V″″′), or (V″″″)). In some instances, a nucleic acid within passenger strand (sense strand) (not at the 5′ or 3′ end) from Table 1, Table 2, Table 3, or Table 4 is conjugated with X2-GalNAc (see Formula (V), (V′), (V″), (V″′), (V″″), (V″′″), or (V″″″)). In some instances, the 3′ end of guide strand (antisense strand) from Table 1, Table 2, Table 3, or Table 4 is conjugated with X2-GalNAc (see Formula (V), (V′), (V″), (V″′), (V″″), (V″″′), or (V″″″)). In some instances, the 5′ end of guide strand (antisense strand) from Table 1, Table 2, Table 3, or Table 4 is conjugated with X2-GalNAc (see Formula (V), (V′), (V″), (V″′), (V″″), (V″″′), or (V″″″)). In some instances, a nucleic acid within guide strand (antisense strand) (not at the 5′ or 3′ end) from Table 1, Table 2, Table 3, or Table 4 is conjugated with X2-GalNAc (see Formula (V), (V′), (V″), (V″′), (V″″), (V″′″), or (V″″″)).

[0260] One or more endosomal escape moieties (e.g., from 1 to 6 or from 1 to 3) can be attached to a polynucleotide construct or a hybridized polynucleotide construct disclosed herein as an auxiliary moiety. Exemplary endosomal escape moieties include chemotherapeutics (e.g., quinolones such as chloroquine); fusogenic lipids (e.g., dioleoylphosphatidyl-ethanolamine (DOPE)); and polymers such as polyethylenimine (PEI); poly(beta-amino ester)s; polypeptides, such as polyarginines (e.g., octaarginine) and polylysines (e.g., octalysine); proton sponges, viral capsids, and peptide transduction domains as described herein. For example, fusogenic peptides can be derived from the M2 protein of influenza A viruses; peptide analogs of the influenza virus hemagglutinin; the HEF protein of the influenza C virus; the transmembrane glycoprotein of filoviruses; the transmembrane glycoprotein of the rabies virus; the transmembrane glycoprotein (G) of the vesicular stomatitis virus; the fusion protein of the Sendai virus; the transmembrane glycoprotein of the Semliki forest virus; the fusion protein of the human respiratory syncytial virus (RSV); the fusion protein of the measles virus; the fusion protein of the Newcastle disease virus; the fusion protein of the visna virus; the fusion protein of murine leukemia virus; the fusion protein of the HTL virus; and the fusion protein of the simian immunodeficiency virus (SIV). Other moieties that can be employed to facilitate endosomal escape are described in Dominska et al., Journal of Cell Science, 123(8):1183-1189, 2010. Specific examples of endosomal escape moieties including moieties suitable for conjugation to the hybridized polynucleotide constructs disclosed herein are provided, e.g., in WO 2015/188197; the disclosure of these endosomal escape moieties is incorporated by reference herein.

[0261] One or more endosomal escape moieties (e.g., from 1 to 6 or from 1 to 3) can be attached to a MOIETY or X2 in formula (V′, V″, V″′, V″″, V″″′, or V″″″) through -LinkA-, as described herein.

[0262] One or more cell penetrating peptides (CPP) (e.g., from 1 to 6 or from 1 to 3) can be attached to a polynucleotide construct or a hybridized polynucleotide construct disclosed herein as an auxiliary moiety. The CPP can be linked to the hybridized polynucleotide bioreversibly through a disulfide linkage, as disclosed herein. Thus, upon delivery to a cell, the CPP can be cleaved intracellularly, e.g., by an intracellular enzyme (e.g., protein disulfide isomerase, thioredoxin, or a thioesterase) and thereby release the polynucleotide.

[0263] CPPs are known in the art (e.g., TAT or Arg8) (Snyder and Dowdy, 2005, Expert Opin. Drug Deliv. 2, 43-51). Specific examples of CPPs including moieties suitable for conjugation to the hybridized polynucleotide constructs disclosed herein are provided, e.g., in WO 2015/188197; the disclosure of these CPPs is incorporated by reference herein.

[0264] CPPs are positively charged peptides that are capable of facilitating the delivery of biological cargo to a cell. It is believed that the cationic charge of the CPPs is essential for their function. Moreover, the transduction of these proteins does not appear to be affected by cell type, and these proteins can efficiently transduce nearly all cells in culture with no apparent toxicity (Nagahara et al., Nat. Med. 4:1449-52, 1998). In addition to full-length proteins, CPPs have also been used successfully to induce the intracellular uptake of DNA (Abu-Amer, supra), antisense polynucleotides (Astriab-Fisher et al., Pharm. Res, 19:744-54, 2002), small molecules (Polyakov et al., Bioconjug. Chem. 11:762-71, 2000) and even inorganic 40 nm iron particles (Dodd et al., J. Immunol. Methods 256:89-105, 2001; Wunderbaldinger et al., Bioconjug. Chem. 13:264-8, 2002; Lewin et al., Nat. Biotechnol. 18:410-4, 2000; Josephson et al., Bioconjug. Chem. 10:186-91, 1999) suggesting that there is considerable flexibility in particle size in this process.

[0265] In one embodiment, a CPP useful in the methods and compositions as described herein includes a peptide featuring substantial alpha-helicity. It has been discovered that transfection is optimized when the CPP exhibits significant alpha-helicity. In another embodiment, the CPP includes a sequence containing basic amino acid residues that are substantially aligned along at least one face of the peptide. A CPP described herein may be a naturally occurring peptide or a synthetic peptide.

[0266] One or more cell penetrating peptides (e.g., from 1 to 6 or from 1 to 3) can be attached to a MOIETY or X2 in formula (V′, V″, V″′, V″″, V″″′, or V″″″) through -LinkA-, as described herein.

[0267] The polynucleotide constructs and the hybridized polynucleotide constructs disclosed herein can also include covalently attached neutral polymer-based auxiliary moieties. Neutral polymers include poly(C1-6 alkylene oxide), e.g., poly(ethylene glycol) and poly(propylene glycol) and copolymers thereof, e.g., di- and triblock copolymers. Other examples of polymers include esterified poly(acrylic acid), esterified poly(glutamic acid), esterified poly(aspartic acid), poly(vinyl alcohol), poly(ethylene-co-vinyl alcohol), poly(N-vinyl pyrrolidone), poly(ethyloxazoline), poly(alkylacrylates), poly(acrylamide), poly(N-alkylacrylamides), poly(N-acryloylmorpholine), poly(lactic acid), poly(glycolic acid), poly(dioxanone), poly(caprolactone), styrene-maleic acid anhydride copolymer, poly(L-lactide-co-glycolide) copolymer, divinyl ether-maleic anhydride copolymer, N-(2-hydroxypropyl)methacrylamide copolymer (HMPA), polyurethane, N-isopropylacrylamide polymers, and poly(N,N-dialkylacrylamides). Exemplary polymer auxiliary moieties may have molecular weights of less than 100, 300, 500, 1000, or 5000 Da (e.g., greater than 100 Da). Other polymers are known in the art.

[0268] One or more polymers (e.g., from 1 to 6 or from 1 to 3) can be attached to a MOIETY or X2 in formula (V′, V″, V″′, V″″, V″″′, or V″″″) through -LinkA-, as described herein.

### Conjugation Linkers

[0269] In some aspects, the polynucleic acid molecules described herein comprises a passenger strand or guide strand bonded to at least one group of formula (I)

[chemical structure]

[0270] or a salt thereof, or a stereoisomer thereof,
[0271] where
[0272] each X¹ is independently O or S;
[0273] each X² is independently O, S, NH, or a bond;
[0274] MOIETY is optionally substituted C₂₋₁₀ alkane-tetrayl or a group -M¹-M²-M³-, wherein each M¹ and each M³ is independently absent or optionally substituted C₁₋₆ alkylene, and M² is optionally substituted C₃₋₉ heterocycle-tetrayl, optionally substituted C₆₋₁₀ arene-tetrayl, or optionally substituted C₃₋₈ cycloalkane-tetrayl;
[0275] each R¹ and each R² is independently H, optionally substituted C₁₋₁₆ alkyl, optionally substituted C₂₋₁₆ heteroalkyl, a conjugation moiety, or -LinkA(-T)ₚ, provided that at least one R¹ or at least one R² is a conjugation moiety or -LinkA(-T)ₚ;
[0276] each R³ is independently H, optionally substituted C₁₋₁₆ alkyl, optionally substituted C₂₋₁₆ heteroalkyl, optionally substituted C₂₋₁₆ alkenyl, optionally substituted C₂₋₁₆ alkynyl, optionally substituted (C₁₋₉ heterocyclyl)-C₁₋₆-alkyl, optionally substituted (C₆₋₁₀ aryl)-C₁₋₆-alkyl, optionally substituted (C₃₋₈ cycloalkyl)-C₁₋₆-alkyl, a conjugation moiety, or -LinkA(-T)ₚ;
[0277] R⁴ is H, optionally substituted C₁₋₆ alkyl, -LinkA(-T)ₚ, or -Sol;
[0278] each LinkA is independently a multivalent linker (e.g., including —C(O)—N(H)— (e.g., at least one multivalent linker including —C(O)—N(H)— bonded to T));
[0279] each T is independently an auxiliary moiety;
[0280] Sol is solid support;
[0281] m is an integer from 1 to 6;
[0282] each n is independently 0 or 1;
[0283] each p is independently an integer from 1 to 6; and q is an integer from 0 to 3.

[0284] The at least one group of formula (I) may be bonded to a 5′ end, 3′ end, internucleoside phosphate, internucleoside phosphorothioate, or internucleoside phosphorodithioate of the polynucleotide. When the at least one group of formula (I) is bonded to the internucleoside phosphate, internucleoside phosphorothioate, or internucleoside phosphorodithioate, q is 0. The polynucleotide construct contains no more than one Sol.

[0285] Group -LinkA- can include from 0 to 3 multivalent monomers (e.g., optionally substituted C1-6 alkane-triyl, optionally substituted C1-6 alkane-tetrayl, or trivalent nitrogen atom) and one or more divalent monomers (e.g., from 1 to 40), where each divalent monomer is independently optionally substituted C1-6 alkylene; optionally substituted C2-6 alkenylene; optionally substituted C2-6 alkynylene; optionally substituted C3-8 cycloalkylene; optionally substituted C3-8 cycloalkenylene; optionally substituted C6-14 arylene; optionally substituted C1-9 heteroarylene having 1 to 4 heteroatoms selected from N, O, and S; optionally substituted C1-9 heterocyclylene having 1 to 4 heteroatoms selected from N, O, and S; imino; optionally substituted N; O; or S(O)m, wherein m is 0, 1, or 2. In some aspects, each monomer is independently optionally substituted C1-6 alkylene; optionally substituted C3-8 cycloalkylene; optionally substituted C3-8 cycloalkenylene; optionally substituted C6-14 arylene; optionally substituted C1-9 heteroarylene having 1 to 4 heteroatoms selected from N, O, and S; optionally substituted C1-9 heterocyclylene having 1 to 4 heteroatoms selected from N, O, and S; imino; optionally substituted N; O; or S(O)m, where m is 0, 1, or 2 (e.g., m is 2). In certain aspects, each monomer is independently optionally substituted C1-6 alkylene; optionally substituted C3-8 cycloalkylene; optionally substituted C3-8 cycloalkenylene; optionally substituted C6-14 arylene; optionally substituted C1-9 heteroarylene having 1 to 4 heteroatoms selected from N, O, and S; optionally substituted C1-9 heterocyclylene having 1 to 4 heteroatoms selected from N, O, and S; optionally substituted N; O; or S(O)m, where m is 0, 1, or 2 (e.g., m is 2). The non-bioreversible linker connecting the auxiliary moiety to the conjugating moiety or to the reaction product thereof can include from 2 to 500 (e.g., from 2 to 300 or from 2 to 200) of such monomers. Group -LinkA- may include a poly(alkylene oxide) (e.g., polyethylene oxide, polypropylene oxide, poly(trimethylene oxide), polybutylene oxide, poly(tetramethylene oxide), and diblock or triblock co-polymers thereof). In some aspects, the non-bioreversible linker includes polyethylene oxide (e.g., poly(ethylene oxide) having a molecular weight of less than 1 kDa).

[0286] Group -LinkA(-T)p in formula (I) may be prepared by a process described in the sections below. In some instances, -LinkA(-T)p is of formula (II):

[chemical structure]

[0287] where
[0288] each s is independently an integer from 0 to 20 (e.g., from 0 to 10), where the repeating units are the same or different;
[0289] Q¹ is a conjugation linker (e.g., [-Q³-Q⁴-Q⁵]ₛ-Q^{C}-, where Q^{C} is optionally substituted C₂₋₁₂ heteroalkylene (e.g., a heteroalkylene containing—C(O)—N(H)—, —N(H)—C(O)—, —S(O)₂—N(H)—, or —N(H)—S(O)₂—), optionally substituted C₁₋₁₂ thioheterocyclvlene e.g.

[chemical structure]

optionally substituted C₁₋₁₂ heterocyclylene (e.g., 1,2,3-triazole-1,4-diyl or

[chemical structure]

cyclobut-3-ene-1,2-dione-3,4-diyl, or pyrid-2-yl hydrazone);
[0290] Q² is a linear group (e.g., [-Q³-Q⁴-Q⁵]ₛ-), if p is 1, or a branched group (e.g., [-Q³-Q⁴-Q⁵]ₛ-Q⁷([Q³-Q⁴-Q⁵]ₛ-(Q⁷)ₚ₁)ₚ₂, where p1 is 0 or 1, p2 is 0, 1, 2, or 3), if p is an integer from 2 to 6;
[0291] each Q³ and each Q⁶ is independently absent, —CO—, —NH—, —O—, —S—, —SO₂—, —OC(O)—, —COO—, —NHC(O)—, —C(O)NH—, —CH₂—, —CH₂NH—, —NHCH₂—, —CH₂O—, or —OCH₂—; each Q⁴ is independently absent, optionally substituted C₁₋₁₂ alkylene, optionally substituted C₂₋₁₂ alkenylene, optionally substituted C₂₋₁₂ alkynylene, optionally substituted C₂₋₁₂ heteroalkylene, optionally substituted C₆₋₁₀ arylene, optionally substituted C₁₋₉ heteroarylene, or optionally substituted C₁₋₉ heterocyclylene;
[0292] each Q⁵ is independently absent, —CO—, —NH—, —O—, —S—, —SO₂—, —CH₂—, —C(O)O—, —OC(O)—,
   —C(O)NH—, —NH—C(O)—, —NH—CH(R^{a})—C(O)—, or —C(O)—CH(R^{a})—NH—;
[0293] each Q⁷ is independently optionally substituted C₁₋₆ alkane-triyl, optionally substituted C₁₋₆ alkane-tetrayl, optionally substituted C₂₋₆ heteroalkane-triyl, or optionally substituted C₂₋₆ heteroalkane-tetrayl; and
[0294] each R^{a} is independently H or an amino acid side chain;
[0295] provided that at least one of Q³, Q⁴, and Q⁵ is present.

[0296] In some aspects, each Q⁴ is independently absent, optionally substituted C₁₋₁₂ alkylene, optionally substituted C₂₋₁₂ alkenylene, optionally substituted C₂₋₁₂ alkynylene, optionally substituted C₂₋₁₂ heteroalkylene, or optionally substituted C₁₋₉ heterocyclylene. In certain aspects, s is 1, 2, 3, 4, 5, 6, 7, 8, 9, 10, 11, 12, 13, 14, 15, 16, 17, 18, 19, or 20.

[0297] Thus, in formula (II), LinkA may include a single branching point, if each p1 is 0, or multiple branching points, if at least one p1 is 1.

[0298] In formula (II), Q¹ may be —O-Q^{L}-Q^{C}-, where Q^{L} is optionally substituted C₂₋₁₂ heteroalkylene, optionally substituted C₁₋₁₂ alkylene, or -(optionally substituted C₁₋₆ alkylene)-(optionally substituted C₆₋₁₀ arylene)-. In some aspects, Q^{L} is optionally substituted C₂₋₁₂ heteroalkylene or optionally substituted C₁₋₁₂ alkylene. In formula (II), Q^{C} may be:

[chemical structure]

[0299] In formula (II), Q² may be a linear group of formula [-Q³-Q⁴-Q⁵]ₛ-where Q³, Q⁴, and Q⁵ are as defined for formula (II). Alternatively, Q² may be a branched group [-Q³_Q⁴-Q⁵]ₛ-Q⁷([-Q³-Q⁴-, Q⁵]ₛ-Q⁷)ₚ₁)ₚ₂, where each Q⁷ is independently optionally substituted C₁₋₆ alkane-triyl, optionally substituted C₁₋₆ alkane-tetrayl, optionally substituted C₂₋₆ heteroalkane-triyl, or optionally substituted C₂₋₆ heteroalkane-tetrayl;
[0300] where
[0301] p1 is 0 or 1;
[0302] p2 is 0, 1, 2, or 3;
[0303] where,
[0304] when p1 is 0, LinkA is a trivalent or tetravalent linker, and,
[0305] when p1 is 1, LinkA is a tetravalent, pentavalent, or hexavalent linker.

[0306] In certain aspects, p1 is 0.

[0307] In some aspects, Q⁷ is:

[chemical structure]

[0308] Compounds that may be used in the preparation of group -LinkA(-T)p in formula (I) are described herein as well as in WO 2015/188197. Non-limiting examples of -LinkA include:

[chemical structure]

[chemical structure]

[chemical structure]

where
[0309] R¹⁸ is a bond to MOIETY,
[0310] each R¹⁹ is independently a bond to auxiliary moiety,
[0311] each m5 is independently an integer from 1 to 20,
[0312] each m6 is independently an integer from 1 to 10,
[0313] m7 is an integer from 1 to 6, and
[0314] each X⁶ is independently O or S.

[0315] In formula (II), when the conjugation linker is of formula [-Q³-Q⁴-Q⁵]ₛ-Q^{C}-, -Q²([-Q³-Q⁴-Q⁵]ₛ-Q⁶-T)ₚ may be:

[chemical structure]

[chemical structure]

[0316] where
[0317] R²⁰ is a bond to Q^{C} in Q¹,
[0318] each R¹⁹ is independently a bond to an auxiliary moiety,
[0319] each m5 is independently an integer from 1 to 20,
[0320] each m6 is independently an integer from 1 to 10,
[0321] m7 is an integer from 1 to 6, and
[0322] each X⁶ is independently O or S.

[0323] In some aspects, the linker described herein is cleavable. In some aspects, the linker described herein is non-cleavable.

[0324] In some aspects, the polynucleic acid molecule described herein comprises a passenger strand or a guide strand bonded to at least one group of formula (IV),

[chemical structure]

wherein at least one of Y1 or Y2 is a nucleotide from the polynucleic acid molecule. In some instances, the linker comprises formula (IV). In some instances, the linker and the asialoglycoprotein receptor targeting moiety with the last nucleotide on the 3′ end of the passenger strand of the polynucleic acid molecule are shown in (V′), (V″ ″), (V″″′), or (V″″″) as described herein.

[0325] In some instances, the Y1 is the last nucleotide on the 3′ end or the first nucleotide on the 5′ end of one of the strands of the polynucleic acid molecule. In some instances, the Y1 is the last nucleotide on the 3′ end or the first nucleotide on the 5′ end of the passenger strand of the polynucleic acid molecule. In some instances, the Y1 is the last nucleotide on the 3′ end or the first nucleotide on the 5′ end of the passenger strand of the polynucleic acid molecule, and the Y2 is a 3-hydroxy-propoxy group. In some instances, the Y2 is the first nucleotide on the 5′ end or the last nucleotide on the 3′ end of one of the strands of the polynucleic acid molecule. In some instances, the Y2 is the first nucleotide on the 5′ end or the last nucleotide on the 3′ end of the passenger strand of the polynucleic acid molecule. In some instances, the Y2 is the first nucleotide on the 5′ end or the last nucleotide on the 3′ end of the passenger strand of the polynucleic acid molecule, and the Y1 is a 3-hydroxy-propoxy group. In other instances, the Y1 and Y2 are two consecutive nucleotides in one of the strands of the polynucleic acid molecule.

[0326] In some aspects, the targeting moiety described herein is conjugated to 3′ end of the passenger strand (e.g., formula (IV′)). In some aspects, the targeting moiety described herein is conjugated to 5′ end of the passenger strand (e.g., formula (IV″) or (IV″′)). In some aspects, the targeting moiety described herein is conjugated to 3′ end of the guide strand (e.g., formula (IV′)). In some aspects, the targeting moiety described herein is conjugated to 5′ end of the guide strand (e.g., formula (IV″) or (IV″′)).

[chemical structure]

wherein Z in formula (IV′) is a moiety that corresponds to one of the sugar modifications described herein (e.g., —H, —OH, —O-Methyl, —F, or —O-methoxyethyl) and R in formula (IV′) is adenine, uracil, guanine, cytosine, thymine, abasic, or others.

[chemical structure]

wherein Z in formula (IV″) is a moiety that corresponds to one of the sugar modifications described herein (e.g., —H, —OH, —O-Methyl, —F, or —O-methoxyethyl) and R in formula (IV″) is adenine, uracil, guanine, cytosine, thymine, abasic, or others.

[chemical structure]

wherein Z in formula (IV″′) is a moiety that corresponds to one of the sugar modifications described herein (e.g., —H, —OH, —O-Methyl, —F, or —O-methoxyethyl) and R in formula (IV″′) is adenine, uracil, guanine, cytosine, thymine, abasic, or others.

[0327] In some aspects, the linker conjugated with one or more targeting moieties as shown in Formula (IV″) or (IV″′) is added to the first nucleotide on the 5′ end. In some aspects, the linker conjugated with one or more GalNAc as shown in Formula (V″) or (V″′) is added to the first nucleotide on the 5′ end. In some aspects, the modification pattern comprises one or more phosphorothioate modified internucleotide linkages. In some aspects, the modification pattern is shown in Formula (VII). In some aspects, the 5′ end modification known in the art is applied to the one or more inverted nucleotides.

### Pharmaceutical Compositions

[0328] Delivery of the polynucleic acid molecules described herein can be achieved by contacting a cell with the construct using a variety of methods. In particular aspects, the polynucleic acid molecule described herein is formulated with various excipients, vehicles, and carriers, as described more fully elsewhere herein.

[0329] A pharmaceutical composition described herein can be prepared to include a hybridized polynucleotide construct disclosed herein, into a form suitable for administration to a subject using carriers, excipients, and vehicles. Frequently used excipients include magnesium carbonate, titanium dioxide, lactose, mannitol and other sugars, talc, milk protein, gelatin, starch, vitamins, cellulose and its derivatives, animal and vegetable oils, polyethylene glycols and solvents, such as sterile water, alcohols, glycerol, and polyhydric alcohols. Intravenous vehicles include fluid and nutrient replenishers. Preservatives include antimicrobial, anti-oxidants, chelating agents, and inert gases. Other pharmaceutically acceptable vehicles include aqueous solutions, non-toxic excipients, including salts, preservatives, buffers and the like, as described, for instance, in Remington: The Science and Practice of Pharmacy, 21st Ed., Gennaro, Ed., Lippencott Williams & Wilkins (2005), and The United States Pharmacopeia: The National Formulary (USP 36 NF31), published in 2013. The pH and exact concentration of the various components of the pharmaceutical composition are adjusted according to routine skills in the art. See Goodman and Gilman's, The Pharmacological Basis for Therapeutics.

[0330] The pharmaceutical compositions described herein may be administered locally or systemically. The therapeutically effective amounts will vary according to factors, such as the degree of infection in a subject, the age, sex, and weight of the individual. Dosage regimes can be adjusted to provide the optimum therapeutic response. For example, several divided doses can be administered daily or the dose can be proportionally reduced as indicated by the exigencies of the therapeutic situation.

[0331] The pharmaceutical composition can be administered in a convenient manner, such as by injection (e.g., subcutaneous, intravenous, intraorbital, and the like), oral administration, ophthalmic application, inhalation, topical application, or rectal administration. Depending on the route of administration, the pharmaceutical composition can be coated with a material to protect the pharmaceutical composition from the action of enzymes, acids, and other natural conditions that may inactivate the pharmaceutical composition. The pharmaceutical composition can also be administered parenterally or intraperitoneally. Dispersions can also be prepared in glycerol, liquid polyethylene glycols, and mixtures thereof, and in oils. Under ordinary conditions of storage and use, these preparations may contain a preservative to prevent the growth of microorganisms.

[0332] Pharmaceutical compositions suitable for injectable use include sterile aqueous solutions (where water soluble) or dispersions and sterile powders for the extemporaneous preparation of sterile injectable solutions or dispersions. The composition will typically be sterile and fluid to the extent that easy syringability exists. Typically the composition will be stable under the conditions of manufacture and storage and preserved against the contaminating action of microorganisms, such as bacteria and fungi. The vehicle can be a solvent or dispersion medium containing, for example, water, ethanol, polyol (for example, glycerol, propylene glycol, and liquid polyethylene glycol, and the like), suitable mixtures thereof, and vegetable oils. The proper fluidity can be maintained, for example, by the use of a coating, such as lecithin, by the maintenance of the required particle size, in the case of dispersion, and by the use of surfactants.

[0333] Prevention of the action of microorganisms can be achieved by various antibacterial and antifungal agents, for example, parabens, chlorobutanol, phenol, ascorbic acid, thimerosal, and the like. In many cases, isotonic agents, for example, sugars, polyalcohols, such as mannitol, sorbitol, or sodium chloride are used in the composition. Prolonged absorption of the injectable compositions can be brought about by including in the composition an agent that delays absorption, for example, aluminum monostearate and gelatin.

[0334] Sterile injectable solutions can be prepared by incorporating the pharmaceutical composition in the required amount in an appropriate solvent with one or a combination of ingredients enumerated above, as required, followed by filtered sterilization. Generally, dispersions are prepared by incorporating the pharmaceutical composition into a sterile vehicle that contains a basic dispersion medium and the required other ingredients from those enumerated above.

[0335] It is especially advantageous to formulate parenteral compositions in dosage unit form for ease of administration and uniformity of dosage. Dosage unit form as used herein, refers to physically discrete units suited as unitary dosages for the subject to be treated; each unit containing a predetermined quantity of pharmaceutical composition is calculated to produce the desired therapeutic effect in association with the required pharmaceutical vehicle. The specification for the dosage unit forms are related to the characteristics of the pharmaceutical composition and the particular therapeutic effect to be achieve. The principal pharmaceutical composition is compounded for convenient and effective administration in effective amounts with a suitable pharmaceutically acceptable vehicle in an acceptable dosage unit. In the case of compositions containing supplementary active ingredients, the dosages are determined by reference to the usual dose and manner of administration of the ingredients.

[0336] The pharmaceutical composition can be orally administered, for example, in a carrier, e.g., in an enteric-coated unit dosage form. The pharmaceutical composition and other ingredients can also be enclosed in a hard or soft-shell gelatin capsule or compressed into tablets. For oral therapeutic administration, the pharmaceutical composition can be incorporated with excipients and used in the form of ingestible tablets, troches, capsules, pills, wafers, and the like. Such compositions and preparations should contain at least 1% by weight of active compound. The percentage of the compositions and preparations can, of course, be varied and can conveniently be between about 5% to about 80% of the weight of the unit. The tablets, troches, pills, capsules, and the like can also contain the following: a binder, such as gum tragacanth, acacia, corn starch, or gelatin; excipients such as dicalcium phosphate; a disintegrating agent, such as corn starch, potato starch, alginic acid, and the like; a lubricant, such as magnesium stearate; and a sweetening agent, such as sucrose, lactose or saccharin, or a flavoring agent such as peppermint, oil of wintergreen, or cherry flavoring. When the dosage unit form is a capsule, it can contain, in addition to materials of the above type, a liquid carrier. Various other materials can be present as coatings or to otherwise modify the physical form of the dosage unit. For instance, tablets, pills, or capsules can be coated with shellac, sugar, or both. A syrup or elixir can contain the agent, sucrose as a sweetening agent, methyl and propylparabens as preservatives, a dye, and flavoring, such as cherry or orange flavor. Any material used in preparing any dosage unit form should be of pharmaceutically acceptable purity and substantially non-toxic in the amounts employed. In addition, the pharmaceutical composition can be incorporated into sustained-release preparations and formulations.

[0337] The pharmaceutical composition described herein may comprise one or more permeation enhancer that facilitates bioavailability of the polynucleic acid molecule described herein. WO 2000/67798, Muranishi, 1990, Crit. Rev. Ther. Drug Carrier Systems, 7, 1, Lee et al., 1991, Crit. Rev. Ther. Drug Carrier Systems, 8, 91 are herein incorporated by reference in its entirety. In some aspects, the permeation enhancer is intestinal. In some aspects, the permeation enhancer is transdermal. In some aspects, the permeation enhancer is to facilitate crossing the brain-blood barrier. In some aspects, the permeation enhancer improves the permeability in the oral, nasal, buccal, pulmonary, vaginal, or corneal delivery model. In some aspects, the permeation enhancer is a fatty acid or a derivative thereof. In some aspects, the permeation enhancer is a surfactant or a derivative thereof. In some aspects, the permeation enhancer is a bile salt or a derivative thereof. In some aspects, the permeation enhancer is a chelating agent or a derivative thereof. In some aspects, the permeation enhancer is a non-chelating non-surfactant or a derivative thereof. In some aspects, the permeation enhancer is an ester or a derivative thereof. In some aspects, the permeation enhancer is an ether or a derivative thereof. In some aspects, the permeation enhancer is arachidonic acid, undecanoic acid, oleic acid, lauric acid, caprylic acid, capric acid, myristic acid, palmitic acid, stearic acid, linoleic acid, linolenic acid, dicaprate, tricaprate, monoolein, dilaurin, glyceryl 1-monocaprate, 1-dodecylazacycloheptan-2-one, an acylcarnitine, an acylcholine, or a monoglyceride, a diglyceride or a pharmaceutically acceptable salt thereof. In one specific aspect, the permeation enhancer is sodium caprate (C10).

[0338] In some aspects, the permeation enhancer is chenodeoxycholic acid (CDCA), ursodeoxychenodeoxycholic acid (UDCA), cholic acid, dehydrocholic acid, deoxycholic acid, glucholic acid, glycholic acid, glycodeoxycholic acid, taurocholic acid taurodeoxycholic acid, sodium tauro-24,25-dihydro-fusidate or sodium glycodihydrofusidate. In some aspects, the permeation enhancer is polyoxyethylene-9-lauryl ether, or polyoxyethylene-20-cetyl ether.

[0339] For the polynucleic acid molecule described herein, suitable pharmaceutically acceptable salts include (i) salts formed with cations such as sodium, potassium, ammonium, magnesium, calcium, polyamines such as spermine and spermidine, etc.; (ii) acid addition salts formed with inorganic acids, for example hydrochloric acid, hydrobromic acid, sulfuric acid, phosphoric acid, and the like; and (iii) salts formed with organic acids such as, for example, acetic acid, oxalic acid, tartaric acid, succinic acid, maleic acid, fumaric acid, gluconic acid, citric acid, malic acid, ascorbic acid, benzoic acid, tannic acid, palmitic acid, alginic acid, polyglutamic acid, naphthalenesulfonic acid, methanesulfonic acid, p-toluenesulfonic acid, naphthalenedisulfonic acid, polygalacturonic acid, and the like.

[0340] While the hybridized polynucleotide constructs described herein may not require the use of excipients for delivery to the target cell, the use of excipients may be advantageous in some aspects. Thus, for delivery to the target cell, the hybridized polynucleic acid molecule described herein can non-covalently bind an excipient to form a complex. The excipient can be used to alter biodistribution after delivery, to enhance uptake, to increase half-life or stability of the strands in the hybridized polynucleotide constructs (e.g., improve nuclease resistance), and/or to increase targeting to a particular cell or tissue type.

[0341] Exemplary excipients include a condensing agent (e.g., an agent capable of attracting or binding a nucleic acid through ionic or electrostatic interactions); a fusogenic agent (e.g., an agent capable of fusing and/or being transported through a cell membrane); a protein to target a particular cell or tissue type (e.g., thyrotropin, melanotropin, lectin, glycoprotein, surfactant protein A, or any other protein); a lipid; a lipopolysaccharide; a lipid micelle or a liposome (e.g., formed from phospholipids, such as phosphotidylcholine, fatty acids, glycolipids, ceramides, glycerides, cholesterols, or any combination thereof); a nanoparticle (e.g., silica, lipid, carbohydrate, or other pharmaceutically-acceptable polymer nanoparticle); a polyplex formed from cationic polymers and an anionic agent (e.g., a CRO), where exemplary cationic polymers include polyamines (e.g., polylysine, polyarginine, polyamidoamine, and polyethylene imine); cholesterol; a dendrimer (e.g., a polyamidoamine (PAMAM) dendrimer); a serum protein (e.g., human serum albumin (HSA) or low-density lipoprotein (LDL)); a carbohydrate (e.g., dextran, pullulan, chitin, chitosan, inulin, cyclodextrin, or hyaluronic acid); a lipid; a synthetic polymer, (e.g., polylysine (PLL), polyethylenimine, poly-L-aspartic acid, poly-L-glutamic acid, styrene-maleic acid anhydride copolymer, poly(L-lactide-co-glycolic) copolymer, divinyl ether-maleic anhydride copolymer, N-(2-hydroxypropyl)methacrylamide copolymer (HMPA), polyethylene glycol (PEG), polyvinyl alcohol (PVA), polyurethane, poly(2-ethylacrylic acid), N-isopropylacrylamide polymer, pseudopeptide-polyamine, peptidomimetic polyamine, or polyamine); a cationic moiety (e.g., cationic lipid, cationic porphyrin, quaternary salt of a polyamine, or alpha helical peptide); a multivalent sugar (e.g., multivalent lactose, multivalent galactose, N-acetyl-galactosamine, N-acetyl-glucosamine, multivalent mannose, or multivalent fucose); a vitamin (e.g., vitamin A, vitamin E, vitamin K, vitamin B, folic acid, vitamin B12, riboflavin, biotin, or pyridoxal); a cofactor; or a drug to disrupt cellular cytoskeleton to increase uptake (e.g., taxol, vincristine, vinblastine, cytochalasin, nocodazole, japlakinolide, latrunculin A, phalloidin, swinholide A, indanocine, or myoservin).

[0342] Other therapeutic agents as described herein may be included in a pharmaceutical composition described herein in combination with a polynucleic acid molecule described herein.

### Methods of Treatment

[0343] In some aspects, described herein is a method of modulating mRNA expression of ANGPTL3 gene in a subject, comprising: administering to the subject a polynucleic acid molecule described herein, a polynucleic acid molecule conjugate described herein, or a pharmaceutical composition described herein, thereby modulating the mRNA expression of ANGPTL3 gene in the subject. In some aspects, described herein is a method of preventing, alleviating, or treating ANGPTL3-associated disease or symptom thereof in a subject in need thereof, comprising: administering to the subject a polynucleic acid molecule described herein, a polynucleic acid molecule conjugate described herein, or a pharmaceutical composition described herein.

[0344] In some aspects, the method described herein reduces expression of ANGPTL3 gene in a subject by about or at least 10% compared to a negative control. In some aspects, the method described herein reduces expression of ANGPTL3 gene in a subject by about or at least 20% compared to a negative control. In some aspects, the method described herein reduces expression of ANGPTL3 gene in a subject by about or at least 30% compared to a negative control. In some aspects, the method described herein reduces expression of ANGPTL3 gene in a subject by about or at least 40% compared to a negative control. In some aspects, the method described herein reduces expression of ANGPTL3 gene in a subject by about or at least 50% compared to a negative control. In some aspects, the method described herein reduces expression of ANGPTL3 gene in a subject by about or at least 60% compared to a negative control. In some aspects, the method described herein reduces expression of ANGPTL3 gene in a subject by about or at least 70% compared to a negative control. In some aspects, the method described herein reduces expression of ANGPTL3 gene in a subject by about or at least 80% compared to a negative control. In some aspects, the method described herein reduces expression of ANGPTL3 gene in a subject by about or at least 90% compared to a negative control. In some aspects, the method described herein reduces expression of ANGPTL3 gene in a subject by about 100% compared to a negative control.

[0345] In some aspects, described herein is a method of modulating ANGPTL3 protein level in a subject in need thereof, comprising administering to the subject a polynucleic acid molecule described herein, a polynucleic acid molecule conjugate described herein, or a pharmaceutical composition described herein, wherein the polynucleic acid molecule described herein, the polynucleic acid molecule conjugate described herein, or the pharmaceutical composition described herein modulates the ANGPTL3 protein level in the subject. In some aspects, described herein is a method of preventing, alleviating, or treating ANGPTL3-associated disease or symptom thereof in a subject in need thereof, comprising: administering to the subject a polynucleic acid molecule described herein, a polynucleic acid molecule conjugate described herein, or a pharmaceutical composition described herein, wherein the polynucleic acid molecule described herein, the polynucleic acid molecule conjugate described herein, or the pharmaceutical composition described herein modulates the ANGPTL3 protein level in the subject.

[0346] In some another aspects, the method described herein reduces ANGPTL3 activity level in a subject by about or at least 10% compared to a negative control. In some aspects, the method described herein reduces ANGPTL3 level in a subject by about or at least 20% compared to a negative control. In some aspects, the method described herein reduces ANGPTL3 level in a subject by about or at least 30% compared to a negative control. In some aspects, the method described herein reduces ANGPTL3 level in a subject by about or at least 40% compared to a negative control. In some aspects, the method described herein reduces ANGPTL3 level in a subject by about or at least 50% compared to a negative control. In some aspects, the method described herein reduces ANGPTL3 level in a subject by about or at least 60% compared to a negative control. In some aspects, the method described herein reduces ANGPTL3 level in a subject by about or at least 70% compared to a negative control. In some aspects, the method described herein reduces ANGPTL3 level in a subject by about or at least 80% compared to a negative control. In some aspects, the method described herein reduces ANGPTL3 level in a subject by about or at least 90% compared to a negative control. In some aspects, the method described herein reduces ANGPTL3 level in a subject by about 100% compared to a negative control.

[0347] In some aspects, provided herein includes methods of preventing, alleviating, or treating ANGPLT3-related or associated disease or a symptom thereof in a subject. In some aspects, the ANGPLT3-related or associated disease or a symptom comprises hyperlipedemia, coronary heart disease, vascular disease, severe hypertriglyceridemia, familial chylomicronemia syndrome (FCS), high fasting triglycerides on restricted low-fat diet, overweight or obese, type 2 diabetes, dyslipidaemia, cardiovascular disease,atherosclerosis, stroke, acute pancreatitis, atherosclerotic cardiovascular disease, atrial fibrillation, myocardial infarction, calcific aortic valve stenosis, suffers from cardiac arrest, or peripheral arterial disease.

### EXAMPLES

[0348] These examples are provided for illustrative purposes only and not to limit the scope of the claims provided herein. For all of the sequences presented below, oligonucleotide structure representation reads from left to right (5′ to 3′). Monomer codes present in the oligonucleotide code are linked by 5′-3′ phosphodiester bonds unless specified (succeeded by 3′ intemucleotide linkage reading left to right). Abbreviations of nucleotide monomers used in oligonucleotide structure representation are as follows. “A” stands for Adenosine-3′-phosphate; “a” stands for 2′-O-methyladenosine-3′-phosphate; “Af” stands for 2′-fluoroadenosine-3′-phosphate; “dA” stands for 2′-deoxyadenosine-3′-phosphate; “al” refers to 2-Amino-2′-O-methyladenosine-3′-phosphate; “C” stands for Cytidine-3′-phosphate; “c” stands for 2′-O-methylcytidine-3′-phosphate; “Cf” stands for 2′-fluorocytidine-3′-phosphate; “dC” stands for 2′-deoxycytidine-3′-phosphate; “G” stands for Guanosine-3′-phosphate; “g” stands for 2′-O-methylguanosine-3′-phosphate; “Gf” stands for 2′-fluoroguanosine-3′-phosphate; “dG” stands for 2′-deoxyguanosine-3′-phosphate; “U” stands for Uridine-3′-phosphate; “u” stands for 2′-O-methyluridine-3′-phosphate; “Uf” stands for 2′-fluorouridine-3′-phosphate; “u3” refers to 2′-O-methyl-2-thiouridine-3′-phosphate; “U3f” refers to 2′-fluoro-2-thiouridine-3′-phosphate; “dU” stands for 2′-deoxyuridine-3′-phosphate; “T” stands for 5-methyluridine-3′-phosphate; “t” stands for 2′-O-methyl-5-methyluridine-3′-phosphate; “Tf” stands for 2′-fluoro-5-methyluridine-3′-phosphate; “dT” stands for thymidine-3′-phosphate; “s” stands for 3′-phosphorothioate; “(T-T)” refers to acyclic L-threoninol nucleic acid-thymine-3′-phosphate; “(T-A)” refers to acyclic L-threoninol nucleic acid-adenine-3′-phosphate; “(T-NAc)” refers to acyclic N-acetyl L-threoninol abasic nucleic acid-3′phosphate; “(dAB)” refers to 1′,2′-Dideoxyribose-3′-phosphate; and “(Tgn)” refers to thymidine-glycol nucleic acid (GNA)S-isomer.

### Example 1—In Vitro Efficacy of siRNAs Targeting ANGPTL3

[0349] A panel of siRNAs were generated (shown in Table 1), and each passenger strand (sense strand) was conjugated with a triantennary GalNAc moiety. The siRNA-GalNAc conjugates were evaluated in vitro in primary human hepatocytes.

[0350] Cryopreserved primary human hepatocytes (PHHs) were thawed and plated on collagen-coated 96-well plates at a density of 9×10⁴ cells per well. Hepatocytes were treated by incubating with the siRNAs shown in Table 1 with each passenger strand (sense strand) conjugated with a triantennary GalNAc moiety in the absence of transfection reagents (free uptake) for 48 hours. Cells were treated with the siRNAs at a concentrations of 10 μM or 0.5 μM. Untreated PHHs were used as a negative control. An siRNA targeting an unrelated gene (Ahsa1) was also used as a negative control. At the end of the incubation period, the cells were lysed, the mRNA was isolated, and the relative expression of the target gene was measured by branched DNA (bDNA) assay and normalized to a house-keeping gene, human GAPDH, using standard protocols. 4 replicates were run per dose level per each siRNA. The result of in vitro potency of the siRNAs are showed in Table 5.

### Example 2—Drug Response Curves for Selected ANGPTL3 siRNAs

[0351] A selected group of siRNAs targeting ANGPTL3 shown in Table 2 were used, and each passenger strand (sense strand) was conjugated with a triantennary GalNAc moiety. For dose response curve determination, primary human hepatocytes are seeded into 96-well plates at appropriate density. The siRNA-GalNAc conjugates were evaluated at 10 different doses in primary human hepatocytes, using a similar experimental setup in Example 1. The corresponding drug response curves are depicted in Table 7.

### Example 3—In Vivo Testing of ANGPTL3 siRNA in Mice

[0352] Selected siRNAs shown in Table 3 or PBS were administered in a single subcutaneous dose into transgenic ANGPTL3 mice (n=6 per group) available commercially from Shanghai Model Organisms Center, Inc (C57BL/6-Angptl3^{em2(hANGPTL3)Smoc}, cat #NM-HU-210036). The 3′ end of the passenger strand (sense strand) of each siRNA is conjugated with a triantennary GalNAc moiety (X2-GalNAc as in Formula (V′)). Selected siRNAs were administered at a single subcutaneous dose level of 1 mg/kg on day 0. Serum hANGPTL3 protein levels were measured by ELISA (R&D Systems, cat #DANL30) on days −4 (predose) and days 7, 14, 21, 28, 35, 42, 49, 56, and 63. For each individual, the % change in serum ANGPTL3 relative to the day −4 predose value was calulated. The group average % change in serum hANGPTL3 protein levels from day −4 baseline and standard error are reported in Table 8. Results are plotted and shown in FIG. 1.

Example 3: Study Design

| | ANGPTL3 | | | | |
|---|---|---|---|---|---|
| | Target | Group | | Dose | Blood |
| Duplex ID | Position | # | n/group | Level | Collection |
| PBS/Vehicle | — | 1 | 6 | Single | Days −4 |
| SRS-000651 | 269 | 2 | 6 | 1 | (predose), 7, |
| SRS-000652 | 412 | 3 | 6 | mg/kg | 14, 21, 28, 35, |
| SRS-000653 | 485 | 4 | 6 | SQ | 42, 49, 56, 63 |
| SRS-000654 | 520 | 5 | 6 | on | |
| SRS-000656 | 1101 | 6 | 6 | Day 0 | |
| SRS-000658 | 1357 | 7 | 6 | | |
| SRS-000659 | 1363 | 8 | 6 | | |

### Example 4—In Vivo Testing of ANGPTL3 siRNA in Mice

[0353] Selected siRNAs shown in Table 3 or PBS were administered in a single subcutaneous dose into transgenic ANGPTL3 mice (n=5 per group) available commercially from Shanghai Model Organisms Center, Inc (C57BL/6-Angptl3^{em2(hANGPTL3)Smoc}, cat #NM-HU-210036). The 3′ end of the passenger strand (sense strand) of each siRNA is conjugated with a triantennary GalNAc moiety (X2-GalNAc as in Formula (V′)). Selected siRNAs were administered at a single subcutaneous dose level of 1 mg/kg on day 0. Serum hANGPTL3 protein levels were measured by ELISA (R&D Systems, cat #DANL30) on days −4 (predose) and days 7, 14, 21, 28, 35, 42, 49, 56, and 63. For each individual, the % change in serum ANGPTL3 relative to the day −4 predose value was calulated. The group average % change in serum hANGPTL3 protein levels from day −4 baseline and standard error are reported in Table 8. Results are plotted and shown in FIG. 1. The average 0% change in serum hANGPTL3 protein levels from day−4 baseline and standard error are reported in Table 9. Results are plotted and shown in FIG. 2.

Example 4: Study Design

| | ANGPTL3 | | | | |
|---|---|---|---|---|---|
| | Target | Group | | Dose | Blood |
| Duplex ID | Position | # | n/group | Level | Collection |
| PBS/Vehicle | — | 1 | 5 | Single | Days −4 |
| SRS-000559 | 56 | 2 | 5 | 1 | (predose), 7, |
| SRS-000569 | 354 | 3 | 5 | mg/kg | 14, 21, 28, 35, |
| SRS-000566 | 165 | 4 | 5 | SQ | 42, 49, 56, 63 |
| SRS-000570 | 396 | 5 | 5 | on | |
| SRS-000576 | 1358 | 6 | 5 | Day 0 | |
| SRS-000571 | 473 | 7 | 5 | | |
| SRS-000561 | 72 | 8 | 5 | | |
| SRS-000572 | 555 | 9 | 5 | | |
| SRS-000577 | 1384 | 10 | 5 | | |
| SRS-000651 | 269 | 11 | 5 | | |

### Example 5—In Vivo Testing of ANGPTL3 siRNA in Mice

[0354] Selected siRNAs shown in Table 3 or PBS were administered in a single subcutaneous dose into transgenic ANGPTL3 mice (n=5 per group) available commercially from Shanghai Model Organisms Center, Inc (C57BL/6 Angptl3^{em2(hANGPTL3)Smoc}, cat #NM-HU-210036). The 3′ end of the passenger strand (sense strand) of each siRNA is conjugated with a triantennary GalNAc moiety (X2-GaNAc as in Formula (V′)). Selected siRNAs were administered at a single subcutaneous dose level of 1 mg/kg on day 0. Serum hANGPTL3 protein levels were measured by ELISA (R&D Systems, cat #DANL30) on days −4 (predose) and days 7, 14, 21, and 28. For each individual, the 00 change in serum ANGPTL3 relative to the day −4 predose value was calulated. The average 0 change in serum hANGPTL3 protein levels from day −4 baseline and standard error are reported in Table 10. Results are plotted and shown in FIG. 3.

### Example 5: Study Design

Example 5: Study Design

| | ANGPTL3 | | | | |
|---|---|---|---|---|---|
| | Target | Group | | Dose | Blood |
| Duplex ID | Position | # | n/group | Level | Collection |
| PBS/Vehicle | NA | 1 | 5 | Single | Days −4 |
| SRS-000563 | 159 | 2 | 5 | 1 | (predose), |
| SRS-000578 | 1496 | 3 | 5 | mg/kg | 7, 14, 21, |
| SRS-000568 | 283 | 4 | 5 | SQ | 28 |
| SRS-000575 | 1014 | 5 | 5 | on | |
| SRS-000560 | 71 | 6 | 5 | Day 0 | |
| SRS-000650 | 151 | 7 | 5 | | |
| SRS-000564 | 161 | 8 | 5 | | |
| SRS-000657 | 1103 | 9 | 5 | | |
| SRS-000661 | 1494 | 10 | 5 | | |
| SRS-000655 | 1012 | 11 | 5 | | |
| SRS-000651 | 269 | 12 | 5 | | |

### Example 6—In Vivo Testing of ANGPTL3 siRNA in Mice

[0355] Selected siRNAs shown in Table 3 or PBS were administered in a single subcutaneous dose into transgenic ANGPTL3 mice (n=5 per group) available commercially from Shanghai Model Organisms Center, Inc (C57BL/6-Angptl3^{em2(hANGPTL3)Smoc}, cat #NM-HU-210036). The 3′ end of the passenger strand (sense strand) of each siRNA is conjugated with a triantennary GalNAc moiety (X2-GalNAc as in Formula (V′)). Selected siRNAs were administered at a single subcutaneous dose level of 1 mg/kg on day 0. Serum hANGPTL3 protein levels were measured by ELISA (R&D Systems, cat #DANL30) on days −4 (predose) and days 7, 14, 21, 28, 35, and 42. For each individual, the % change in serum ANGPTL3 relative to the PBS group mean per timepoint was calculated. The average % change in serum hANGPTL3 protein levels relative to the PBS group and standard error are reported in Table 11. Results are plotted and

Example 6: Study Design

| | ANGPTL3 | | | | |
|---|---|---|---|---|---|
| | Target | Group | | Dose | Blood |
| Duplex ID | Position | # | n/group | Level | Collection |
| PBS/Vehicle | NA | 1 | 5 | Single | Days −4 |
| SRS-001803 | 54 | 2 | 5 | 1 | (predose), 7, |
| SRS-001804 | 158 | 3 | 5 | mg/kg | 14, 21, 28, 35, |
| SRS-001805 | 267 | 4 | 5 | SQ | 42 |
| SRS-001806 | 281 | 5 | 5 | on | |
| SRS-001807 | 919 | 6 | 5 | Day 0 | |
| SRS-001808 | 1007 | 7 | 5 | | |
| SRS-001809 | 1008 | 8 | 5 | | |
| SRS-001810 | 1013 | 9 | 5 | | |
| SRS-001811 | 1099 | 10 | 5 | | |
| SRS-001812 | 1102 | 11 | 5 | | |
| SRS-000651 | 269 | 12 | 5 | | |

### Example 7—In Vivo Testing of ANGPTL3 siRNA in Non-Human Primates (NHP)

[0356] Sequences of siRNAs used for the non-human primate study are specified in Table 4 The 3′ end of each passenger strand (sense strand) is conjugated with a GalNAc via X2 (as in Formula (V′)). SRS-001704 was used as a benchmark or a reference in this example.

[0357] Information regarding SRS-001704 is shown below:

Guide/antisense structure code:
(SEQ ID NO: 886)
5′-usAfscsUfgAfuCfaAfaUfaUfgUfuGfaGfsc-3′;
Guide/antisense base sequence:
(SEQ ID NO: 885)
5′-UACUGAUCAAAUAUGUUGAGC-3′;

[0358] Passenger/sense structure code: 5′-s(invAb)sgcucaacaUfAfUfuugaucaguas(invAb)-3′ (SEQ ID NO: 888), and a GalNAc was conjugated to the 5′ end of the passenger strand via formula V″′; and

Passenger/sense base sequence:
(SEQ ID NO: 887)
5′-GCUCAACAUAUUUGAUCAGUA-3′.

[0359] On day 1, male cynomolgus monkeys (n=4 per treatment group/siRNA) were administered a single 2 mg/kg subcutaneous injection of ANGPTL3 siRNA constructs as shown in Table 4, or sterile istonic saline. Blood samples were collected pre-dose, and on days 4, 8, 11, 15, 22, 29, 36, 43, 50, 57, 64, 71, 78,85, 92, 99, 113, 127, 141, and 155, and processed to serum. ANGPTL3 circulating protein levels in all serum samples were analyzed using an ANGPTL3 ELISA assay (Thermo Fisher, catalog #: EH29RBX5). Results are expressed as the group mean of each individual's % change in circulating ANGPTL3 protein relative to the day 1 pre-dose timepoint and shown in Table 12 and FIG. 5. To assess depth of ANGPTL3 mRNA silencing in liver tissue, ultrasound guided liver biopsies were collected pre-dose (day −15) and on days 29, 57, and 85. At each timepoint, qPCR was performed on all samples to measure ANGPTL3 mRNA, normalizing to ACTB housekeeping gene. ANGPTL3 mRNA expression relative to the day −15 timepoint are plotted in FIG. 6.

### Example 8—In Vivo Testing of ANGPTL3 siRNA in Mice

[0360] Selected siRNAs shown in Table 3 or PBS were administered in a single subcutaneous dose into transgenic ANGPTL3 mice (n=5 per group) available commercially from Shanghai Model Organisms Center, Inc (C57BL/6-Angptl3^{em2(hANGPTL3)Smoc}, cat #NM-HU-210036). The 3′ end of the passenger strand (sense strand) of each siRNA is conjugated with a triantennary GalNAc moiety (X2-GalNAc as in Formula (V′)). Selected siRNAs were administered at a single subcutaneous dose level of 1 mg/kg on day 0. Serum hANGPTL3 protein levels were measured by ELISA (R&D Systems, cat #DANL30) on Days −4 (predose) and days 7, 14, 21, 28,and 35. For each individual, the % change in serum ANGPTL3 relative to the PBS group mean per timepoint was calculated. The average % change in serum hANGPTL3 protein levels relative to the PBS group and standard error are reported in Table 13. Results are plotted and shown in FIG. 7.

[0361] While preferred aspects of the present disclosure have been shown and described herein, it will be obvious to those skilled in the art that such aspects are provided by way of example only. Numerous variations, changes, and substitutions will now occur to those skilled in the art without departing from the disclosure. It should be understood that various alternatives to the aspects of the disclosure described herein may be employed in practicing the disclosure. It is intended that the following claims define the scope of the disclosure and that methods and structures within the scope of these claims and their equivalents be covered thereby.

TABLE 1
siRNAs Evaluated at 10 and 0.5 μM in vitro in primary human hepatocytes

| Duplex | Target | SEQ ID | Guide/Antisense Structure | SEQ ID | Guide/Antisense Base | SEQ ID | Passenger/Sense | SEQ ID | Passenger/Sense Base |
|---|---|---|---|---|---|---|---|---|---|
| ID | Position | NO. | Code (5′-3′) | NO. | Sequence (5′-3′) | NO. | Structure Code (5′-3′) | NO. | Sequence (5′-3′) |
| SRS- | 44 | 201 | usGfscuuaAfuuguGfaAfcAf | 1 | UGCUUAAUUGUGAACAU | 601 | asasaaauGfuUfcAfcaau | 401 | AAAAAUGUUCACAAU |
| 000362 | | | uuuuusasu | | UUUUAU | | uaagca | | UAAGCA |
| SRS- | 47 | 202 | usGfsgagcUfuaauUfgUfgAf | 2 | UGGAGCUUAAUUGUGAA | 602 | asasuguuCfaCfaAfuuaa | 402 | AAUGUUCACAAUUAA |
| 000363 | | | acauususu | | CAUUUU | | gcucca | | GCUCCA |
| SRS- | 49 | 203 | usAfsaggaGfcuuaAfuUfgUf | 3 | UAAGGAGCUUAAUUGUG | 603 | usgsuucaCfaAfuUfaagc | 403 | UGUUCACAAUUAAGC |
| 000364 | | | gaacasusu | | AACAUU | | uccuua | | UCCUUA |
| SRS- | 52 | 204 | usAfsagaaGfgagcUfuAfaUf | 4 | UAAGAAGGAGCUUAAUU | 604 | uscsacaaUfuAfaGfcucc | 404 | UCACAAUUAAGCUCCU |
| 000365 | | | ugugasasc | | GUGAAC | | uucuua | | UCUUA |
| SRS- | 56 | 205 | usUfsaaaaAfgaagGfaGfcUf | 5 | UUAAAAAGAAGGAGCUU | 605 | asasuuaaGfcUfcCfuucu | 405 | AAUUAAGCUCCUUCUU |
| 000366 | | | uaauusgsu | | AAUUGU | | uuuuaa | | UUUAA |
| SRS- | 57 | 206 | usAfsuaaaAfagaaGfgAfgCf | 6 | UAUAAAAAGAAGGAGCU | 606 | asusuaagCfuCfcUfucuu | 406 | AUUAAGCUCCUUCUUU |
| 000367 | | | uuaaususg | | UAAUUG | | uuuaua | | UUAUA |
| SRS- | 71 | 207 | usUfsaacuAfgaggAfaCfaAf | 7 | UUAACUAGAGGAACAAU | 607 | ususuuauUfgUfuCfcuc | 407 | UUUUAUUGUUCCUCU |
| 000368 | | | uaaaasasg | | AAAAAG | | uaguuaa | | AGUUAA |
| SRS- | 72 | 208 | usAfsuaacUfagagGfaAfcAf | 8 | UAUAACUAGAGGAACAA | 608 | ususuauuGfuUfcCfucu | 408 | UUUAUUGUUCCUCUA |
| 000369 | | | auaaasasa | | UAAAAA | | aguuaua | | GUUAUA |
| SRS- | 76 | 209 | usGfsgaaaUfaacuAfgAfgGf | 9 | UGGAAAUAACUAGAGGA | 609 | ususguucCfuCfuAfguu | 409 | UUGUUCCUCUAGUUA |
| 000370 | | | aacaasusa | | ACAAUA | | auuucca | | UUUCCA |
| SRS- | 149 | 210 | usCfsuaacAfuagcAfaAfuCf | 10 | UCUAACAUAGCAAAUCU | 610 | asuscaag AfuUfuGfcua | 410 | AUCAAGAUUUGCUAU |
| 000371 | | | uugaususu | | UGAUUU | | uguuaga | | GUUAGA |
| SRS- | 151 | 211 | usGfsucuaAfcauaGfcAfaAf | 11 | UGUCUAACAUAGCAAAU | 611 | csasagauUfuGfcUfaug | 411 | CAAGAUUUGCUAUGU |
| 000372 | | | ucuugsasu | | CUUGAU | | uuagaca | | UAGACA |
| SRS- | 152 | 212 | usCfsgucuAfacauAfgCfaAf | 12 | UCGUCUAACAUAGCAAA | 612 | asasgauuUfgCfuAfugu | 412 | AAGAUUUGCUAUGUU |
| 000373 | | | aucuusgsa | | UCUUGA | | uagacga | | AGACGA |
| SRS- | 153 | 213 | usUfscgucUfaacaUfaGfcAf | 13 | UUCGUCUAACAUAGCAA | 613 | asgsauuuGfcUfaUfguu | 413 | AGAUUUGCUAUGUUA |
| 000374 | | | aaucususg | | AUCUUG | | agacgaa | | GACGAA |
| SRS- | 154 | 214 | usAfsucguCfuaacAfuAfgCf | 14 | UAUCGUCUAACAUAGCA | 614 | gsasuuugCfuAfuGfuua | 414 | GAUUUGCUAUGUUAG |
| 000375 | | | aaaucsusu | | AAUCUU | | gacgaua | | ACGAUA |
| SRS- | 155 | 215 | usCfsaucgUfcuaaCfaUfaGf | 15 | UCAUCGUCUAACAUAGC | 615 | asusuugc UfaUfgUfuag | 415 | AUUUGCUAUGUUAGA |
| 000376 | | | caaauscsu | | AAAUCU | | acgauga | | CGAUGA |
| SRS- | 156 | 216 | usAfscaucGfucuaAfcAfuAf | 16 | UACAUCGUCUAACAUAG | 616 | ususugcuAfuGfuUfaga | 416 | UUUGCUAUGUUAGAC |
| 000377 | | | gcaaasusc | | CAAAUC | | cgaugua | | GAUGUA |
| SRS- | 157 | 217 | usUfsacauCfgucuAfaCfaUf | 17 | UUACAUCGUCUAACAUA | 617 | ususgcuaUfgUfuAfgac | 417 | UUGCUAUGUUAGACG |
| 000378 | | | agcaasasu | | GCAAAU | | gauguaa | | AUGUAA |
| SRS- | 158 | 218 | usUfsuuacAfucguCfuAfaCf | 18 | UUUUACAUCGUCUAACA | 618 | gscsuaugUfuAfgAfcga | 418 | GCUAUGUUAGACGAU |
| 000379 | | | auagcsasa | | UAGCAA | | uguaaaa | | GUAAAA |
| SRS- | 160 | 219 | usUfsuuuaCfaucgUfcUfaAf | 19 | UUUUUACAUCGUCUAAC | 619 | csusauguUfaGfaCfgau | 419 | CUAUGUUAGACGAUG |
| 000380 | | | cauagscsa | | AUAGCA | | guaaaaa | | UAAAAA |
| SRS- | 161 | 220 | usUfsuuuuAfcaucGfuCfuAf | 20 | UUUUUUACAUCGUCUAA | 620 | usasuguuAfgAfcGfaug | 420 | UAUGUUAGACGAUGU |
| 000381 | | | acauasgsc | | CAUAGC | | uaaaaaa | | AAAAAA |
| SRS- | 163 | 221 | usAfsauuuUfuacaUfcGfuCf | 21 | UAAUUUUUACAUCGUCU | 621 | usgsuuagAfcGfaUfgua | 421 | UGUUAGACGAUGUAA |
| 000382 | | | uaacasusa | | AACAUA | | aaaauua | | AAAUUA |
| SRS- | 165 | 222 | usAfsaaauUfuuuaCfaUfcGf | 22 | UAAAAUUUUUACAUCGU | 622 | ususagac GfaUfgUfaaaa | 422 | UUAGACGAUGUAAAA |
| 000383 | | | ucuaascsa | | CUAACA | | auuuua | | AUUUUA |
| SRS- | 178 | 223 | usGfsaggcCfauugGfcUfaAf | 23 | UGAGGCCAUUGGCUAAA | 623 | asasauuuUfaGfcCfaaug | 423 | AAAUUUUAGCCAAUG |
| 000384 | | | | | AUUUUU | | gccuca | | GCCUCA |
| SRS- | 179 | 224 | usGfsgaggCfcauuGfgCfuAf | 24 | UGGAGGCCAUUGGCUAA | 624 | asasuuuuAfgCfcAfaug | 424 | AAUUUUAGCCAAUGG |
| 000385 | | | aaauususu | | AAUUUU | | gccucca | | CCUCCA |
| SRS- | 183 | 225 | usUfsgaagGfaggcCfaUfuGf | 25 | UUGAAGGAGGCCAUUGG | 625 | ususagccAfaUfgGfccuc | 425 | UUAGCCAAUGGCCUCC |
| 000386 | | | gcuaasasa | | CUAAAA | | cuucaa | | UUCAA |
| SRS- | 187 | 226 | usCfsaacuGfaaggAfgGfcCf | 26 | UCAACUGAAGGAGGCCA | 626 | cscsaaugGfcCfuCfcuuc | 426 | CCAAUGGCCUCCUUCA |
| 000387 | | | auuggscsu | | UUGGCU | | aguuga | | GUUGA |
| SRS- | 188 | 227 | usCfscaacUfgaagGfaGfgCf | 27 | UCCAACUGAAGGAGGCC | 627 | csasauggCfcUfcCfuuca | 427 | CAAUGGCCUCCUUCAG |
| 000388 | | | cauugsgsc | | AUUGGC | | guugga | | UUGGA |
| SRS- | 189 | 228 | usCfsccaaCfugaaGfgAfgGf | 28 | UCCCAACUGAAGGAGGC | 628 | asasuggcCfuCfcUfucag | 428 | AAUGGCCUCCUUCAGU |
| 000389 | | | ccauusgsg | | CAUUGG | | uuggga | | UGGGA |
| SRS- | 195 | 229 | usCfscaugUfcccaAfcUfgAf | 29 | UCCAUGUCCCAACUGAA | 629 | csusccuuCfaGfuUfggg | 429 | CUCCUUCAGUUGGGAC |
| 000390 | | | aggagsgsc | | GGAGGC | | acaugga | | AUGGA |
| SRS- | 198 | 230 | usAfsgaccAfugucCfcAfaCf | 30 | UAGACCAUGUCCCAACU | 630 | csusucag UfuGfgGfaca | 430 | CUUCAGUUGGGACAU |
| 000391 | | | ugaagsgsa | | GAAGGA | | uggucua | | GGUCUA |
| SRS- | 202 | 231 | usUfsuuaaGfaccaUfgUfcCf | 31 | UUUUAAGACCAUGUCCC | 631 | asgsuuggGfaCfaUfggu | 431 | AGUUGGGACAUGGUC |
| 000392 | | | caacusgsa | | AACUGA | | cuuaaaa | | UUAAAA |
| SRS- | 204 | 232 | usUfscuuuAfagacCfaUfgUf | 32 | UUCUUUAAGACCAUGUC | 632 | ususgggaCfaUfgGfucu | 432 | UUGGGACAUGGUCUU |
| 000393 | | | cccaascsu | | CCAACU | | uaaagaa | | AAAGAA |
| SRS- | 206 | 233 | usAfsgucuUfuaagAfcCfaUf | 33 | UAGUCUUUAAGACCAUG | 633 | gsgsgacaUfgGfuCfuua | 433 | GGGACAUGGUCUUAA |
| 000394 | | | gucccsasa | | UCCCAA | | aagacua | | AGACUA |
| SRS- | 207 | 234 | usAfsaguc UfuuaaGfaCfcAf | 34 | UAAGUCUUUAAGACCAU | 634 | gsgsacauGfgUfcUfuaaa | 434 | GGACAUGGUCUUAAA |
| 000395 | | | uguccscsa | | GUCCCA | | gacuua | | GACUUA |
| SRS- | 208 | 235 | usAfsaaguCfuuuaAfgAfcCf | 35 | UAAAGUCUUUAAGACCA | 635 | gsascaugGfuCfuUfaaag | 435 | GACAUGGUCUUAAAG |
| 000396 | | | augucscsc | | UGUCCC | | acuuua | | ACUUUA |
| SRS- | 209 | 236 | usCfsaaag UfcuuuAfaGfaCf | 36 | UCAAAGUCUUUAAGACC | 636 | ascsauggUfcUfuAfaaga | 436 | ACAUGGUCUUAAAGA |
| 000397 | | | cauguscsc | | AUGUCC | | cuuuga | | CUUUGA |
| SRS- | 210 | 237 | usAfscaaaGfucuuUfaAfgAf | 37 | UACAAAGUCUUUAAGAC | 637 | csasugguCfuUfaAfagac | 437 | CAUGGUCUUAAAGAC |
| 000398 | | | ccaugsusc | | CAUGUC | | uuugua | | UUUGUA |
| SRS- | 217 | 238 | usCfsuuauGfgacaAfaGfuCf | 38 | UCUUAUGGACAAAGUCU | 638 | ususaaagAfcUfuUfguc | 438 | UUAAAGACUUUGUCC |
| 000399 | | | uuuaasgsa | | UUAAGA | | cauaaga | | AUAAGA |
| SRS- | 237 | 239 | usUfscauuAfauuuGfgCfcCf | 39 | UUCAUUAAUUUGGCCCU | 639 | ascsgaagGfgCfcAfaauu | 439 | ACGAAGGGCCAAAUU |
| 000400 | | | uucguscsu | | UCGUCU | | aaugaa | | AAUGAA |
| SRS- | 269 | 240 | usAfscugaUfcaaaUfaUfgUf | 40 | UACUGAUCAAAUAUGUU | 640 | ascsucaaCfaUfaUfuuga | 440 | ACUCAACAUAUUUGA |
| 000401 | | | ugagususu | | GAGUUU | | ucagua | | UCAGUA |
| SRS- | 274 | 241 | usAfsaaagAfcugaUfcAfaAf | 41 | UAAAAGACUGAUCAAAU | 641 | ascsauauUfuGfaUfcagu | 441 | ACAUAUUUGAUCAGU |
| 000402 | | | uaugususg | | AUGUUG | | cuuuua | | CUUUUA |
| SRS- | 282 | 242 | usAfsgaucAfuaaaAfaGfaCf | 42 | UAGAUCAUAAAAAGACU | 642 | gsasucag UfcUfuUfuua | 442 | GAUCAGUCUUUUUAU |
| 000403 | | | ugaucsasa | | GAUCAA | | ugaucua | | GAUCUA |
| SRS- | 283 | 243 | usUfsagauCfauaaAfaAfgAf | 43 | UUAGAUCAUAAAAAGAC | 643 | asuscaguCfuUfuUfuau | 443 | AUCAGUCUUUUUAUG |
| 000404 | | | cugauscsa | | UGAUCA | | gaucuaa | | AUCUAA |
| SRS- | 354 | 244 | usUfsugacUfuguaGfuUfuAf | 44 | UUUGACUUGUAGUUUAU | 644 | ascsauauAfaAfcUfacaa | 444 | ACAUAUAAACUACAA |
| 000405 | | | uaugusasg | | AUGUAG | | gucaaa | | GUCAAA |
| SRS- | 396 | 245 | usUfsuugaGfuugaGfuUfcAf | 45 | UUUUGAGUUGAGUUCAA | 645 | uscsacuuGfaAfcUfcaac | 445 | UCACUUGAACUCAACU |
| 000406 | | | agugascsa | | GUGACA | | ucaaaa | | CAAAA |
| SRS- | 412 | 246 | usUfsaggaGfgcuuUfcAfaGf | 46 | UUAGGAGGCUUUCAAGU | 646 | csasaaacUfuGfaAfagcc | 446 | CAAAACUUGAAAGCCU |
| 000407 | | | uuuugsasg | | UUUGAG | | uccuaa | | CCUAA |
| SRS- | 462 | 247 | usAfsguugCfucuuCfuAfaAf | 47 | UAGUUGCUCUUCUAAAU | 647 | asasauauUfuAfgAfaga | 447 | AAAUAUUUAGAAGAG |
| 000408 | | | uauuuscsa | | AUUUCA | | gcaacua | | CAACUA |
| SRS- | 470 | 248 | usAfsguuaGfuuagUfuGfcUf | 48 | UAGUUAGUUAGUUGCUC | 648 | asgsaagaGfcAfaCfuaac | 448 | AGAAGAGCAACUAAC |
| 000409 | | | cuucusasa | | UUCUAA | | uaacua | | UAACUA |
| SRS- | 472 | 249 | usUfsaaguUfaguuAfgUfuGf | 49 | UUAAGUUAGUUAGUUGC | 649 | asasgagc AfaCfuAfacua | 449 | AAGAGCAACUAACUA |
| 000410 | | | cucuuscsu | | UCUUCU | | acuuaa | | ACUUAA |
| SRS- | 473 | 250 | usUfsuaagUfuaguUfaGfuUf | 50 | UUUAAGUUAGUUAGUUG | 650 | asgsagcaAfcUfaAfcuaa | 450 | AGAGCAACUAACUAAC |
| 000411 | | | gcucususc | | CUCUUC | | cuuaaa | | UUAAA |
| SRS- | 474 | 251 | usAfsuuaaGfuuagUfuAfgUf | 51 | UAUUAAGUUAGUUAGUU | 651 | gsasgcaaCfuAfaCfuaac | 451 | GAGCAACUAACUAACU |
| 000412 | | | ugcucsusu | | GCUCUU | | uuaaua | | UAAUA |
| SRS- | 485 | 252 | usGfsuugaUfuuugAfaUfuAf | 52 | UGUUGAUUUUGAAUUAA | 652 | usasacuuAfaUfuCfaaaa | 452 | UAACUUAAUUCAAAA |
| 000413 | | | aguuasgsu | | GUUAGU | | ucaaca | | UCAACA |
| SRS- | 520 | 253 | usAfsagugAfaguuAfcUfuCf | 53 | UAAGUGAAGUUACUUCU | 653 | ascsccagAfaGfuAfacuu | 453 | ACCCAGAAGUAACUUC |
| 000414 | | | ugggusgsu | | GGGUGU | | cacuua | | ACUUA |
| SRS- | 521 | 254 | usUfsaaguGfaaguUfaCfuUf | 54 | UUAAGUGAAGUUACUUC | 654 | cscscagaAfgUfaAfcuuc | 454 | CCCAGAAGUAACUUCA |
| 000415 | | | cugggsusg | | UGGGUG | | acuuaa | | CUUAA |
| SRS- | 553 | 255 | usGfsaugcUfauuaUfcUfuGf | 55 | UGAUGCUAUUAUCUUGU | 655 | asasaaacAfaGfaUfaaua | 455 | AAAAACAAGAUAAUA |
| 000416 | | | | | UUUUCU | | gcauca | | GCAUCA |
| SRS- | 555 | 256 | usUfsugauGfcuauUfaUfcUf | 56 | UUUGAUGCUAUUAUCUU | 656 | asasacaaGfaUfaAfuagc | 456 | AAACAAGAUAAUAGC |
| 000417 | | | uguuususu | | GUUUUU | | aucaaa | | AUCAAA |
| SRS- | 560 | 257 | usGfsgucuUfugauGfcUfaUf | 57 | UGGUCUUUGAUGCUAUU | 657 | asgsauaaUfaGfcAfucaa | 457 | AGAUAAUAGCAUCAA |
| 000418 | | | uaucususg | | AUCUUG | | agacca | | AGACCA |
| SRS- | 562 | 258 | usAfsagguCfuuugAfuGfcUf | 58 | UAAGGUCUUUGAUGCUA | 658 | asusaauaGfcAfuCfaaag | 458 | AUAAUAGCAUCAAAG |
| 000419 | | | auuauscsu | | UUAUCU | | accuua | | ACCUUA |
| SRS- | 609 | 259 | usCfsuaugCfuguuGfgUfuUf | 59 | UCUAUGCUGUUGGUUUA | 659 | csasauuaAfaCfcAfacag | 459 | CAAUUAAACCAACAGC |
| 000420 | | | aauugsusu | | AUUGUU | | cauaga | | AUAGA |
| SRS- | 615 | 260 | usAfsuuugAfcuauGfcUfgUf | 60 | UAUUUGACUAUGCUGUU | 660 | asasccaaCfaGfcAfuagu | 460 | AACCAACAGCAUAGUC |
| 000421 | | | ugguususa | | GGUUUA | | caaaua | | AAAUA |
| SRS- | 703 | 261 | usAfsguucUfugguGfcUfcUf | 61 | UAGUUCUUGGUGCUCUU | 661 | asgsccaaGfaGfcAfccaa | 461 | AGCCAAGAGCACCAAG |
| 000422 | | | uggcususg | | GGCUUG | | gaacua | | AACUA |
| SRS- | 832 | 262 | usUfsugagAfguugCfuGfgGf | 62 | UUUGAGAGUUGCUGGGU | 662 | uscsagacCfcAfgCfaacu | 462 | UCAGACCCAGCAACUC |
| 000423 | | | ucugasusg | | CUGAUG | | cucaaa | | UCAAA |
| SRS- | 833 | 263 | usCfsuugaGfaguuGfcUfgGf | 63 | UCUUGAGAGUUGCUGGG | 663 | csasgaccCfaGfcAfacuc | 463 | CAGACCCAGCAACUCU |
| 000424 | | | gucugsasu | | UCUGAU | | ucaaga | | CAAGA |
| SRS- | 834 | 264 | usAfscuugAfgaguUfgCfuGf | 64 | UACUUGAGAGUUGCUGG | 664 | asgsacccAfgCfaAfcucu | 464 | AGACCCAGCAACUCUC |
| 000425 | | | ggucusgsa | | GUCUGA | | caagua | | AAGUA |
| SRS- | 840 | 265 | usUfsgaaaAfacuuGfaGfaGf | 65 | UUGAAAAACUUGAGAGU | 665 | asgscaacUfcUfcAfaguu | 465 | AGCAACUCUCAAGUUU |
| 000426 | | | uugcusgsg | | UGCUGG | | uuucaa | | UUCAA |
| SRS- | 874 | 266 | usCfscaugGfacuaCfcUfgAf | 66 | UCCAUGGACUACCUGAU | 666 | ususauauCfaGfgUfagu | 466 | UUAUAUCAGGUAGUC |
| 000427 | | | uauaascsa | | AUAACA | | ccaugga | | CAUGGA |
| SRS- | 877 | 267 | usUfsguccAfuggaCfuAfcCf | 67 | UUGUCCAUGGACUACCU | 667 | usasucag GfuAfgUfcca | 467 | UAUCAGGUAGUCCAU |
| 000428 | | | ugauasusa | | GAUAUA | | uggacaa | | GGACAA |
| SRS- | 878 | 268 | usAfsugucCfauggAfcUfaCf | 68 | UAUGUCCAUGGACUACC | 668 | asuscaggUfaGfuCfcaug | 468 | AUCAGGUAGUCCAUG |
| 000429 | | | cugausasu | | UGAUAU | | gacaua | | GACAUA |
| SRS- | 879 | 269 | usAfsauguCfcaugGfaCfuAf | 69 | UAAUGUCCAUGGACUAC | 669 | uscsagguAfgUfcCfaug | 469 | UCAGGUAGUCCAUGG |
| 000430 | | | ccugasusa | | CUGAUA | | gacauua | | ACAUUA |
| SRS- | 885 | 270 | usUfsgaauUfaaugUfcCfaUf | 70 | UUGAAUUAAUGUCCAUG | 670 | asgsuccaUfgGfaCfauua | 470 | AGUCCAUGGACAUUA |
| 000431 | | | ggacusasc | | GACUAC | | auucaa | | AUUCAA |
| SRS- | 886 | 271 | usUfsugaaUfuaauGfuCfcAf | 71 | UUUGAAUUAAUGUCCAU | 671 | gsusccauGfgAfcAfuua | 471 | GUCCAUGGACAUUAA |
| 000432 | | | uggacsusa | | GGACUA | | auucaaa | | UUCAAA |
| SRS- | 887 | 272 | usGfsuugaAfuuaaUfgUfcCf | 72 | UGUUGAAUUAAUGUCCA | 672 | uscscaugGfaCfaUfuaau | 472 | UCCAUGGACAUUAAU |
| 000238 | | | auggascsu | | UGGACU | | ucaaca | | UCAACA |
| SRS- | 892 | 273 | usUfscgauGfuugaAfuUfaAf | 73 | UUCGAUGUUGAAUUAAU | 673 | gsgsacauUfaAfuUfcaac | 473 | GGACAUUAAUUCAAC |
| 000433 | | | uguccsasu | | GUCCAU | | aucgaa | | AUCGAA |
| SRS- | 894 | 274 | usAfsuucgAfuguuGfaAfuUf | 74 | UAUUCGAUGUUGAAUUA | 674 | ascsauuaAfuUfcAfacau | 474 | ACAUUAAUUCAACAUC |
| 000434 | | | aauguscsc | | AUGUCC | | cgaaua | | GAAUA |
| SRS- | 895 | 275 | usUfsauucGfauguUfgAfaUf | 75 | UUAUUCGAUGUUGAAUU | 675 | csasuuaaUfuCfaAfcauc | 475 | CAUUAAUUCAACAUCG |
| 000435 | | | uaaugsusc | | AAUGUC | | gaauaa | | AAUAA |
| SRS- | 897 | 276 | usUfscuauUfcgauGfuUfgAf | 76 | UUCUAUUCGAUGUUGAA | 676 | ususaauuCfaAfcAfucga | 476 | UUAAUUCAACAUCGA |
| 000436 | | | auuaasusg | | UUAAUG | | auagaa | | AUAGAA |
| SRS- | 898 | 277 | usAfsucuaUfucgaUfgUfuGf | 77 | UAUCUAUUCGAUGUUGA | 677 | usasauuc AfaCfaUfcgaa | 477 | UAAUUCAACAUCGAA |
| 000437 | | | aauuasasu | | AUUAAU | | uagaua | | UAGAUA |
| SRS- | 899 | 278 | usCfsaucuAfuucgAfuGfuUf | 78 | UCAUCUAUUCGAUGUUG | 678 | asasuucaAfcAfuCfgaau | 478 | AAUUCAACAUCGAAU |
| 000438 | | | gaauusasa | | AAUUAA | | agauga | | AGAUGA |
| SRS- | 902 | 279 | usAfsuccaUfcuauUfcGfaUf | 79 | UAUCCAUCUAUUCGAUG | 679 | uscsaacaUfcGfaAfuaga | 479 | UCAACAUCGAAUAGA |
| 000439 | | | guugasasu | | UUGAAU | | uggaua | | UGGAUA |
| SRS- | 903 | 280 | usGfsaucc AfucuaUfuCfgAf | 80 | UGAUCCAUCUAUUCGAU | 680 | csasacauCfgAfaUfagau | 480 | CAACAUCGAAUAGAU |
| 000440 | | | uguugsasa | | GUUGAA | | ggauca | | GGAUCA |
| SRS- | 904 | 281 | usUfsgaucCfaucuAfuUfcGf | 81 | UUGAUCCAUCUAUUCGA | 681 | asascaucGfaAfuAfgaug | 481 | AACAUCGAAUAGAUG |
| 000441 | | | auguusgsa | | UGUUGA | | gaucaa | | GAUCAA |
| SRS- | 905 | 282 | usGfsugauCfcaucUfaUfuCf | 82 | UGUGAUCCAUCUAUUCG | 682 | ascsaucgAfaUfaGfaugg | 482 | ACAUCGAAUAGAUGG |
| 000442 | | | gaugususg | | AUGUUG | | aucaca | | AUCACA |
| SRS- | 908 | 283 | usUfsuuguGfauccAfuCfuAf | 83 | UUUUGUGAUCCAUCUAU | 683 | uscsgaauAfgAfuGfgau | 483 | UCGAAUAGAUGGAUC |
| 000443 | | | uucgasusg | | UCGAUG | | cacaaaa | | ACAAAA |
| SRS- | 912 | 284 | usAfsaguuUfugugAfuCfcAf | 84 | UAAGUUUUGUGAUCCAU | 684 | asusagauGfgAfuCfacaa | 484 | AUAGAUGGAUCACAA |
| 000444 | | | ucuaususc | | CUAUUC | | aacuua | | AACUUA |
| SRS- | 915 | 285 | usUfsugaaGfuuuuGfuGfaUf | 85 | UUUGAAGUUUUGUGAUC | 685 | gsasuggaUfcAfcAfaaac | 485 | GAUGGAUCACAAAAC |
| 000445 | | | ccaucsusa | | CAUCUA | | uucaaa | | UUCAAA |
| SRS- | 923 | 286 | usAfscguuUfcauuGfaAfgUf | 86 | UACGUUUCAUUGAAGUU | 686 | ascsaaaaCfuUfcAfauga | 486 | ACAAAACUUCAAUGA |
| 000446 | | | uuugusgsa | | UUGUGA | | aacgua | | AACGUA |
| SRS- | 925 | 287 | usCfscacgUfuucaUfuGfaAf | 87 | UCCACGUUUCAUUGAAG | 687 | asasaacuUfcAfaUfgaaa | 487 | AAAACUUCAAUGAAA |
| 000447 | | | guuuusgsu | | UUUUGU | | cgugga | | CGUGGA |
| SRS- | 926 | 288 | usCfsccacGfuuucAfuUfgAf | 88 | UCCCACGUUUCAUUGAA | 688 | asasacuuCfaAfuGfaaac | 488 | AAACUUCAAUGAAAC |
| 000448 | | | aguuususg | | GUUUUG | | guggga | | GUGGGA |
| SRS- | 929 | 289 | usUfscuccCfacguUfuCfaUf | 89 | UUCUCCCACGUUUCAUU | 689 | csusucaaUfgAfaAfcgu | 489 | CUUCAAUGAAACGUG |
| 000449 | | | ugaagsusu | | GAAGUU | | gggagaa | | GGAGAA |
| SRS- | 930 | 290 | usUfsucucCfcacgUfuUfcAf | 90 | UUUCUCCCACGUUUCAU | 690 | ususcaauGfaAfaCfgug | 490 | UUCAAUGAAACGUGG |
| 000450 | | | uugaasgsu | | UGAAGU | | ggagaaa | | GAGAAA |
| SRS- | 931 | 291 | usGfsuucuCfccacGfuUfuCf | 91 | UGUUCUCCCACGUUUCA | 691 | uscsaaugAfaAfcGfugg | 491 | UCAAUGAAACGUGGG |
| 000451 | | | auugasasg | | UUGAAG | | gagaaca | | AGAACA |
| SRS- | 933 | 292 | usUfsaguuCfucccAfcGfuUf | 92 | UUAGUUCUCCCACGUUU | 692 | asasugaaAfcGfuGfgga | 492 | AAUGAAACGUGGGAG |
| 000452 | | | ucauusgsa | | CAUUGA | | gaacuaa | | AACUAA |
| SRS- | 934 | 293 | usGfsuaguUfcuccCfaCfgUf | 93 | UGUAGUUCUCCCACGUU | 693 | asusgaaaCfgUfgGfgaga | 493 | AUGAAACGUGGGAGA |
| 000453 | | | uucaususg | | UCAUUG | | acuaca | | ACUACA |
| SRS- | 936 | 294 | usUfsuguaGfuucuCfcCfaCf | 94 | UUUGUAGUUCUCCCACG | 694 | gsasaacgUfgGfgAfgaac | 494 | GAAACGUGGGAGAAC |
| 000454 | | | guuucsasu | | UUUCAU | | uacaaa | | UACAAA |
| SRS- | 937 | 295 | usUfsuuguAfguucUfcCfcAf | 95 | UUUUGUAGUUCUCCCAC | 695 | asasacguGfgGfaGfaacu | 495 | AAACGUGGGAGAACU |
| 000455 | | | cguuuscsa | | GUUUCA | | acaaaa | | ACAAAA |
| SRS- | 942 | 296 | usCfscauaUfuuguAfgUfuCf | 96 | UCCAUAUUUGUAGUUCU | 696 | usgsggagAfaCfuAfcaaa | 496 | UGGGAGAACUACAAA |
| 000456 | | | ucccascsg | | CCCACG | | uaugga | | UAUGGA |
| SRS- | 965 | 297 | usAfsuucuCfcaucAfaGfcCf | 97 | UAUUCUCCAUCAAGCCU | 697 | usgsggagGfcUfuGfaug | 497 | UGGGAGGCUUGAUGG |
| 000457 | | | ucccasasa | | CCCAAA | | gagaaua | | AGAAUA |
| SRS- | 966 | 298 | usAfsauuc UfccauCfaAfgCf | 98 | UAAUUCUCCAUCAAGCC | 698 | gsgsgaggCfuUfgAfugg | 498 | GGGAGGCUUGAUGGA |
| 000458 | | | cucccsasa | | UCCCAA | | agaauua | | GAAUUA |
| SRS- | 992 | 299 | usAfsguauAfucuuCfuCfuAf | 99 | UAGUAUAUCUUCUCUAG | 699 | gsgsgccuAfgAfgAfaga | 499 | GGGCCUAGAGAAGAU |
| 000459 | | | ggcccsasa | | GCCCAA | | uauacua | | AUACUA |
| SRS- | 994 | 300 | usGfsgaguAfuaucUfuCfuCf | 100 | UGGAGUAUAUCUUCUCU | 700 | gscscuagAfgAfaGfaua | 500 | GCCUAGAGAAGAUAU |
| 000460 | | | uaggcscsc | | AGGCCC | | uacucca | | ACUCCA |
| SRS- | 998 | 301 | usCfsuaugGfaguaUfaUfcUf | 101 | UCUAUGGAGUAUAUCUU | 701 | asgsagaaGfaUfaUfacuc | 501 | AGAGAAGAUAUACUC |
| 000461 | | | ucucusasg | | CUCUAG | | cauaga | | CAUAGA |
| SRS- | 999 | 302 | usAfscuauGfgaguAfuAfuCf | 102 | UACUAUGGAGUAUAUCU | 702 | gsasgaagAfuAfuAfcuc | 502 | GAGAAGAUAUACUCC |
| 000462 | | | uucucsusa | | UCUCUA | | cauagua | | AUAGUA |
| SRS- | 1000 | 303 | usCfsacuaUfggagUfaUfaUf | 103 | UCACUAUGGAGUAUAUC | 703 | asgsaagaUfaUfaCfucca | 503 | AGAAGAUAUACUCCA |
| 000463 | | | cuucuscsu | | UUCUCU | | uaguga | | UAGUGA |
| SRS- | 1001 | 304 | usUfscacuAfuggaGfuAfuAf | 104 | UUCACUAUGGAGUAUAU | 704 | gsasagauAfuAfcUfccau | 504 | GAAGAUAUACUCCAU |
| 000464 | | | ucuucsusc | | CUUCUC | | agugaa | | AGUGAA |
| SRS- | 1002 | 305 | usUfsucacUfauggAfgUfaUf | 105 | UUUCACUAUGGAGUAUA | 705 | asasgauaUfaCfuCfcaua | 505 | AAGAUAUACUCCAUA |
| 000465 | | | aucuuscsu | | UCUUCU | | gugaaa | | GUGAAA |
| SRS- | 1006 | 306 | usUfsugcuUfcacuAfuGfgAf | 106 | UUUGCUUCACUAUGGAG | 706 | usasuacuCfcAfuAfgug | 506 | UAUACUCCAUAGUGA |
| 000466 | | | guauasusc | | UAUAUC | | aagcaaa | | AGCAAA |
| SRS- | 1007 | 307 | usAfsuugc UfucacUfaUfgGf | 107 | UAUUGCUUCACUAUGGA | 707 | asusacucCfaUfaGfugaa | 507 | AUACUCCAUAGUGAA |
| 000467 | | | aguausasu | | GUAUAU | | gcaaua | | GCAAUA |
| SRS- | 1012 | 308 | usAfsuuagAfuugcUfuCfaCf | 108 | UAUUAGAUUGCUUCACU | 708 | cscsauagUfgAfaGfcaau | 508 | CCAUAGUGAAGCAAUC |
| 000468 | | | uauggsasg | | AUGGAG | | cuaaua | | UAAUA |
| SRS- | 1014 | 309 | usUfsaauuAfgauuGfcUfuCf | 109 | UUAAUUAGAUUGCUUCA | 709 | asusagugAfaGfcAfauc | 509 | AUAGUGAAGCAAUCU |
| 000469 | | | acuausgsg | | CUAUGG | | uaauuaa | | AAUUAA |
| SRS- | 1092 | 310 | usUfscgugAfuuucCfcAfaGf | 110 | UUCGUGAUUUCCCAAGU | 710 | ususuuac UfuGfgGfaaa | 510 | UUUUACUUGGGAAAU |
| 000470 | | | uaaaasasg | | AAAAAG | | ucacgaa | | CACGAA |
| SRS- | 1098 | 311 | usUfsugguUfucguGfaUfuUf | 111 | UUUGGUUUCGUGAUUUC | 711 | ususgggaAfaUfcAfcga | 511 | UUGGGAAAUCACGAA |
| 000471 | | | cccaasgsu | | CCAAGU | | aaccaaa | | ACCAAA |
| SRS- | 1100 | 312 | usAfsguugGfuuucGfuGfaUf | 112 | UAGUUGGUUUCGUGAUU | 712 | gsgsgaaaUfcAfcGfaaac | 512 | GGGAAAUCACGAAACC |
| 000472 | | | uucccsasa | | UCCCAA | | caacua | | AACUA |
| SRS- | 1101 | 313 | usUfsaguuGfguuuCfgUfgAf | 113 | UUAGUUGGUUUCGUGAU | 713 | gsgsaaauCfaCfgAfaacc | 513 | GGAAAUCACGAAACCA |
| 000473 | | | uuuccscsa | | UUCCCA | | aacuaa | | ACUAA |
| SRS- | 1103 | 314 | usUfsauagUfugguUfuCfgUf | 114 | UUAUAGUUGGUUUCGUG | 714 | asasaucaCfgAfaAfccaa | 514 | AAAUCACGAAACCAAC |
| 000474 | | | gauuuscsc | | AUUUCC | | cuauaa | | UAUAA |
| SRS- | 1104 | 315 | usGfsuauaGfuuggUfuUfcGf | 115 | UGUAUAGUUGGUUUCGU | 715 | asasucacGfaAfaCfcaac | 515 | AAUCACGAAACCAACU |
| 000475 | | | ugauususc | | GAUUUC | | uauaca | | AUACA |
| SRS- | 1105 | 316 | usCfsguauAfguugGfuUfuCf | 116 | UCGUAUAGUUGGUUUCG | 716 | asuscacgAfaAfcCfaacu | 516 | AUCACGAAACCAACUA |
| 000476 | | | gugaususu | | UGAUUU | | auacga | | UACGA |
| SRS- | 1106 | 317 | usGfscguaUfaguuGfgUfuUf | 117 | UGCGUAUAGUUGGUUUC | 717 | uscsacgaAfaCfcAfacua | 517 | UCACGAAACCAACUAU |
| 000477 | | | cgugasusu | | GUGAUU | | uacgca | | ACGCA |
| SRS- | 1107 | 318 | usAfsgcguAfuaguUfgGfuUf | 118 | UAGCGUAUAGUUGGUUU | 718 | csascgaaAfcCfaAfcuau | 518 | CACGAAACCAACUAUA |
| 000478 | | | ucgugsasu | | CGUGAU | | acgcua | | CGCUA |
| SRS- | 1110 | 319 | usUfsguagCfguauAfgUfuGf | 119 | UUGUAGCGUAUAGUUGG | 719 | gsasaaccAfaCfuAfuacg | 519 | GAAACCAACUAUACGC |
| 000479 | | | guuucsgsu | | UUUCGU | | cuacaa | | UACAA |
| SRS- | 1136 | 320 | usGfsgacaUfugccAfgUfaAf | 120 | UGGACAUUGCCAGUAAU | 720 | usgscgauUfaCfuGfgcaa | 520 | UGCGAUUACUGGCAA |
| 000480 | | | ucgcasasc | | CGCAAC | | ugucca | | UGUCCA |
| SRS- | 1137 | 321 | usGfsggacAfuugcCfaGfuAf | 121 | UGGGACAUUGCCAGUAA | 721 | gscsgauuAfcUfgGfcaa | 521 | GCGAUUACUGGCAAU |
| 000481 | | | aucgcsasa | | UCGCAA | | uguccca | | GUCCCA |
| SRS- | 1138 | 322 | usGfsgggaCfauugCfcAfgUf | 122 | UGGGGACAUUGCCAGUA | 722 | csgsauuaCfuGfgCfaaug | 522 | CGAUUACUGGCAAUG |
| 000482 | | | aaucgscsa | | AUCGCA | | ucccca | | UCCCCA |
| SRS- | 1139 | 323 | usUfsggggAfcauuGfcCfaGf | 123 | UUGGGGACAUUGCCAGU | 723 | gsasuuacUfgGfcAfaug | 523 | GAUUACUGGCAAUGU |
| 000483 | | | uaaucsgsc | | AAUCGC | | uccccaa | | CCCCAA |
| SRS- | 1141 | 324 | usAfsuuggGfgacaUfuGfcCf | 124 | UAUUGGGGACAUUGCCA | 724 | ususacugGfcAfaUfguc | 524 | UUACUGGCAAUGUCCC |
| 000484 | | | aguaasusc | | GUAAUC | | cocaaua | | CAAUA |
| SRS- | 1147 | 325 | usGfsauugCfauugGfgGfaCf | 125 | UGAUUGCAUUGGGGACA | 725 | gscsaaugUfcCfcCfaaug | 525 | GCAAUGUCCCCAAUGC |
| 000485 | | | auugcscsa | | UUGCCA | | caauca | | AAUCA |
| SRS- | 1148 | 326 | usGfsgauuGfcauuGfgGfgAf | 126 | UGGAUUGCAUUGGGGAC | 726 | csasauguCfcCfcAfaugc | 526 | CAAUGUCCCCAAUGCA |
| 000486 | | | cauugscsc | | AUUGCC | | aaucca | | AUCCA |
| SRS- | 1150 | 327 | usCfsgggaUfugcaUfuGfgGf | 127 | UCGGGAUUGCAUUGGGG | 727 | asusguccCfcAfaUfgcaa | 527 | AUGUCCCCAAUGCAAU |
| 000487 | | | gacaususg | | ACAUUG | | ucccga | | CCCGA |
| SRS- | 1154 | 328 | usUfsuuccGfggauUfgCfaUf | 128 | UUUUCCGGGAUUGCAUU | 728 | cscsccaaUfgCfaAfuccc | 528 | CCCCAAUGCAAUCCCG |
| 000488 | | | uggggsasc | | GGGGAC | | ggaaaa | | GAAAA |
| SRS- | 1157 | 329 | usUfsguuuUfccggGfaUfuGf | 129 | UUGUUUUCCGGGAUUGC | 729 | csasaugcAfaUfcCfcgga | 529 | CAAUGCAAUCCCGGAA |
| 000489 | | | cauugsgsg | | AUUGGG | | aaacaa | | AACAA |
| SRS- | 1158 | 330 | usUfsuguuUfuccgGfgAfuUf | 130 | UUUGUUUUCCGGGAUUG | 730 | asasugcaAfuCfcCfggaa | 530 | AAUGCAAUCCCGGAAA |
| 000490 | | | gcauusgsg | | CAUUGG | | aacaaa | | ACAAA |
| SRS- | 1159 | 331 | usUfsuuguUfuuccGfgGfaUf | 131 | UUUUGUUUUCCGGGAUU | 731 | asusgcaaUfcCfcGfgaaa | 531 | AUGCAAUCCCGGAAAA |
| 000491 | | | ugcaususg | | GCAUUG | | acaaaa | | CAAAA |
| SRS- | 1160 | 332 | usCfsuuugUfuuucCfgGfgAf | 132 | UCUUUGUUUUCCGGGAU | 732 | usgscaauCfcCfgGfaaaa | 532 | UGCAAUCCCGGAAAAC |
| 000492 | | | uugcasusu | | UGCAUU | | caaaga | | AAAGA |
| SRS- | 1161 | 333 | usUfscuuuGfuuuuCfcGfgGf | 133 | UUCUUUGUUUUCCGGGA | 733 | gscsaaucCfcGfgAfaaac | 533 | GCAAUCCCGGAAAACA |
| 000493 | | | auugcsasu | | UUGCAU | | aaagaa | | AAGAA |
| SRS- | 1162 | 334 | usAfsucuuUfguuuUfcCfgGf | 134 | UAUCUUUGUUUUCCGGG | 734 | csasauccCfgGfaAfaaca | 534 | CAAUCCCGGAAAACAA |
| 000494 | | | gauugscsa | | AUUGCA | | aagaua | | AGAUA |
| SRS- | 1179 | 335 | usCfsaaguAfgaaaAfcAfcCf | 135 | UCAAGUAGAAAACACCA | 735 | gsasuuugGfuGfuUfuuc | 535 | GAUUUGGUGUUUUCU |
| 000495 | | | aaaucsusu | | AAUCUU | | uacuuga | | ACUUGA |
| SRS- | 1180 | 336 | usCfscaagUfagaaAfaCfaCfc | 136 | UCCAAGUAGAAAACACC | 736 | asusuuggUfgUfuUfucu | 536 | AUUUGGUGUUUUCUA |
| 000496 | | | aaauscsu | | AAAUCU | | acuugga | | CUUGGA |
| SRS- | 1181 | 337 | usCfsccaaGfuagaAfaAfcAf | 137 | UCCCAAGUAGAAAACAC | 737 | ususugguGfuUfuUfcua | 537 | UUUGGUGUUUUCUAC |
| 000497 | | | ccaaasusc | | CAAAUC | | cuuggga | | UUGGGA |
| SRS- | 1186 | 338 | usGfsugauCfccaaGfuAfgAf | 138 | UGUGAUCCCAAGUAGAA | 738 | usgsuuuuCfuAfcUfugg | 538 | UGUUUUCUACUUGGG |
| 000498 | | | aaacascsc | | AACACC | | gaucaca | | AUCACA |
| SRS- | 1189 | 339 | usUfsuuguGfauccCfaAfgUf | 139 | UUUUGUGAUCCCAAGUA | 739 | ususucuaCfuUfgGfgau | 539 | UUUCUACUUGGGAUC |
| 000499 | | | agaaasasc | | GAAAAC | | cacaaaa | | ACAAAA |
| SRS- | 1190 | 340 | usCfsuuugUfgaucCfcAfaGf | 140 | UCUUUGUGAUCCCAAGU | 740 | ususcuacUfuGfgGfauc | 540 | UUCUACUUGGGAUCAC |
| 000500 | | | uagaasasa | | AGAAAA | | acaaaga | | AAAGA |
| SRS- | 1192 | 341 | usUfsgcuuUfgugaUfcCfcAf | 141 | UUGCUUUGUGAUCCCAA | 741 | csusacuuGfgGfaUfcaca | 541 | CUACUUGGGAUCACAA |
| 000501 | | | aguagsasa | | GUAGAA | | aagcaa | | AGCAA |
| SRS- | 1193 | 342 | usUfsugcuUfugugAfuCfcCf | 142 | UUUGCUUUGUGAUCCCA | 742 | usascuugGfgAfuCfacaa | 542 | UACUUGGGAUCACAA |
| 000502 | | | aaguasgsa | | AGUAGA | | agcaaa | | AGCAAA |
| SRS- | 1287 | 343 | usGfsguuuGfuuauAfuUfuA | 143 | UGGUUUGUUAUAUUUAC | 743 | asasugguAfaAfuAfuaa | 543 | AAUGGUAAAUAUAAC |
| 000503 | | | fccauususa | | CAUUUA | | caaacca | | AAACCA |
| SRS- | 1349 | 344 | usAfsccuuCfcauuUfuGfaGf | 144 | UACCUUCCAUUUUGAGA | 744 | gsasagucUfcAfaAfaug | 544 | GAAGUCUCAAAAUGG |
| 000504 | | | acuucscsa | | CUUCCA | | gaaggua | | AAGGUA |
| SRS- | 1357 | 345 | usAfsgaguAfuaacCfuUfcCf | 145 | UAGAGUAUAACCUUCCA | 745 | asasaaugGfaAfgGfuua | 545 | AAAAUGGAAGGUUAU |
| 000505 | | | auuuusgsa | | UUUUGA | | uacucua | | ACUCUA |
| SRS- | 1358 | 346 | usUfsagagUfauaaCfcUfuCf | 146 | UUAGAGUAUAACCUUCC | 746 | asasauggAfaGfgUfuau | 546 | AAAUGGAAGGUUAUA |
| 000506 | | | cauuususg | | AUUUUG | | acucuaa | | CUCUAA |
| SRS- | 1359 | 347 | usAfsuagaGfuauaAfcCfuUf | 147 | UAUAGAGUAUAACCUUC | 747 | asasuggaAfgGfuUfaua | 547 | AAUGGAAGGUUAUAC |
| 000507 | | | ccauususu | | CAUUUU | | cucuaua | | UCUAUA |
| SRS- | 1363 | 348 | usUfsuuuaUfagagUfaUfaAf | 148 | UUUUUAUAGAGUAUAAC | 748 | gsasagguUfaUfaCfucua | 548 | GAAGGUUAUACUCUA |
| 000508 | | | ccuucscsa | | CUUCCA | | uaaaaa | | UAAAAA |
| SRS- | 1365 | 349 | usGfsauuuUfauagAfgUfaUf | 149 | UGAUUUUAUAGAGUAUA | 749 | asgsguuaUfaCfuCfuaua | 549 | AGGUUAUACUCUAUA |
| 000509 | | | aaccususc | | ACCUUC | | aaauca | | AAAUCA |
| SRS- | 1381 | 350 | usGfsaucaAfcauuUfuGfgUf | 150 | UGAUCAACAUUUUGGUU | 750 | asasucaaCfcAfaAfaugu | 550 | AAUCAACCAAAAUGU |
| 000510 | | | ugauususu | | GAUUUU | | ugauca | | UGAUCA |
| SRS- | 1382 | 351 | usGfsgaucAfacauUfuUfgGf | 151 | UGGAUCAACAUUUUGGU | 751 | asuscaacCfaAfaAfuguu | 551 | AUCAACCAAAAUGUU |
| 000511 | | | uugaususu | | UGAUUU | | gaucca | | GAUCCA |
| SRS- | 1383 | 352 | usUfsggauCfaacaUfuUfuGf | 152 | UUGGAUCAACAUUUUGG | 752 | uscsaaccAfaAfaUfguug | 552 | UCAACCAAAAUGUUG |
| 000512 | | | guugasusu | | UUGAUU | | auccaa | | AUCCAA |
| SRS- | 1384 | 353 | usAfsuggaUfcaacAfuUfuUf | 153 | UAUGGAUCAACAUUUUG | 753 | csasaccaAfaAfuGfuuga | 553 | CAACCAAAAUGUUGA |
| 000513 | | | gguugsasu | | GUUGAU | | uccaua | | UCCAUA |
| SRS- | 1386 | 354 | usGfsgaugGfaucaAfcAfuUf | 154 | UGGAUGGAUCAACAUUU | 754 | ascscaaaAfuGfuUfgauc | 554 | ACCAAAAUGUUGAUCC |
| 000514 | | | uuggususg | | UGGUUG | | caucca | | AUCCA |
| SRS- | 1387 | 355 | usUfsggauGfgaucAfaCfaUf | 155 | UUGGAUGGAUCAACAUU | 755 | cscsaaaaUfgUfuGfaucc | 555 | CCAAAAUGUUGAUCCA |
| 000515 | | | uuuggsusu | | UUGGUU | | auccaa | | UCCAA |
| SRS- | 1467 | 356 | usCfsauuaAfcuugGfaAfuGf | 156 | UCAUUAACUUGGAAUGA | 756 | asasccucAfuUfcCfaagu | 556 | AACCUCAUUCCAAGUU |
| 000516 | | | agguusasa | | GGUUAA | | uaauga | | AAUGA |
| SRS- | 1494 | 357 | usAfsggauUfuaauAfcCfaGf | 157 | UAGGAUUUAAUACCAGA | 757 | asusaaucUfgGfuAfuua | 557 | AUAAUCUGGUAUUAA |
| 000517 | | | auuaususa | | UUAUUA | | aauccua | | AUCCUA |
| SRS- | 1496 | 358 | usUfsaaggAfuuuaAfuAfcCf | 158 | UUAAGGAUUUAAUACCA | 758 | asasucugGfuAfuUfaaa | 558 | AAUCUGGUAUUAAAU |
| 000518 | | | agauusasu | | GAUUAU | | uccuuaa | | CCUUAA |
| SRS- | 1498 | 359 | usCfsuuaaGfgauuUfaAfuAf | 159 | UCUUAAGGAUUUAAUAC | 759 | uscsugguAfuUfaAfauc | 559 | UCUGGUAUUAAAUCC |
| 000519 | | | ccagasusu | | CAGAUU | | cuuaaga | | UUAAGA |
| SRS- | 1563 | 360 | usUfsuguaUfguuuAfaUfcUf | 160 | UUUGUAUGUUUAAUCUU | 760 | asusuuaaGfaUfuAfaaca | 560 | AUUUAAGAUUAAACA |
| 000520 | | | uaaausasg | | AAAUAG | | uacaaa | | UACAAA |
| SRS- | 1566 | 361 | usUfsgauuGfuaugUfuUfaAf | 161 | UUGAUUGUAUGUUUAAU | 761 | usasagauUfaAfaCfauac | 561 | UAAGAUUAAACAUAC |
| 000521 | | | ucuuasasa | | CUUAAA | | aaucaa | | AAUCAA |
| SRS- | 1583 | 362 | usUfsauuc UfuuaaGfgUfuAf | 162 | UUAUUCUUUAAGGUUAU | 762 | uscsacauAfaCfcUfuaaa | 562 | UCACAUAACCUUAAAG |
| 000522 | | | ugugasusu | | GUGAUU | | gaauaa | | AAUAA |
| SRS- | 1654 | 363 | usAfsaauuGfauucCfcAfcAf | 163 | UAAAUUGAUUCCCACAU | 763 | usgsugauGfuGfgGfaau | 563 | UGUGAUGUGGGAAUC |
| 000523 | | | ucacasasa | | CACAAA | | caauuua | | AAUUUA |
| SRS- | 1662 | 364 | usAfsccauCfuaaaAfuUfgAf | 164 | UACCAUCUAAAAUUGAU | 764 | gsgsgaauCfaAfuUfuua | 564 | GGGAAUCAAUUUUAG |
| 000524 | | | uucccsasc | | UCCCAC | | gauggua | | AUGGUA |
| SRS- | 1761 | 365 | usUfsauuaGfcucaUfaUfgAf | 165 | UUAUUAGCUCAUAUGAU | 765 | asgsgcauCfaUfaUfgagc | 565 | AGGCAUCAUAUGAGC |
| 000525 | | | ugccususu | | GCCUUU | | uaauaa | | UAAUAA |
| SRS- | 1765 | 366 | usGfsugauAfuuagCfuCfaUf | 166 | UGUGAUAUUAGCUCAUA | 766 | asuscauaUfgAfgCfuaau | 566 | AUCAUAUGAGCUAAU |
| 000526 | | | augausgsc | | UGAUGC | | aucaca | | AUCACA |
| SRS- | 1766 | 367 | usUfsgugaUfauuaGfcUfcAf | 167 | UUGUGAUAUUAGCUCAU | 767 | uscsauauGfaGfcUfaaua | 567 | UCAUAUGAGCUAAUA |
| 000527 | | | uaugasusg | | AUGAUG | | ucacaa | | UCACAA |
| SRS- | 1816 | 368 | usGfsucaaGfuuuaGfaGfuUf | 168 | UGUCAAGUUUAGAGUUU | 768 | gsusuaaaAfcUfcUfaaac | 568 | GUUAAAACUCUAAAC |
| 000528 | | | uuaacsasa | | UAACAA | | uugaca | | UUGACA |
| SRS- | 1818 | 369 | usUfsagucAfaguuUfaGfaGf | 169 | UUAGUCAAGUUUAGAGU | 769 | usasaaac UfcUfaAfacuu | 569 | UAAAACUCUAAACUU |
| 000529 | | | uuuuasasc | | UUUAAC | | gacuaa | | GACUAA |
| SRS- | 1822 | 370 | usUfsauuuAfgucaAfgUfuUf | 170 | UUAUUUAGUCAAGUUUA | 770 | ascsucuaAfaCfuUfgacu | 570 | ACUCUAAACUUGACUA |
| 000530 | | | agagususu | | GAGUUU | | aaauaa | | AAUAA |
| SRS- | 1900 | 371 | usAfscauaCfucugUfgCfuGf | 171 | UACAUACUCUGUGCUGA | 771 | asuscgucAfgCfaCfagag | 571 | AUCGUCAGCACAGAGU |
| 000531 | | | acgaususu | | CGAUUU | | uaugua | | AUGUA |
| SRS- | 2074 | 372 | usGfsucaaUfgugaCfuUfaGf | 172 | UGUCAAUGUGACUUAGU | 772 | gsascuacUfaAfgUfcaca | 572 | GACUACUAAGUCACAU |
| 000532 | | | uagucsasu | | AGUCAU | | uugaca | | UGACA |
| SRS- | 2098 | 373 | usGfsguauAfgugaUfaCfcUf | 173 | UGGUAUAGUGAUACCUC | 773 | ascsaugaGfgUfaUfcacu | 573 | ACAUGAGGUAUCACU |
| 000533 | | | caugususa | | AUGUUA | | auacca | | AUACCA |
| SRS- | 2231 | 374 | usUfsaaacUfuuaaCfuCfgAf | 174 | UUAAACUUUAACUCGAU | 774 | usgsgcauCfgAfgUfuaa | 574 | UGGCAUCGAGUUAAA |
| 000534 | | | ugccascsa | | GCCACA | | aguuuaa | | GUUUAA |
| SRS- | 2232 | 375 | usAfsuaaaCfuuuaAfcUfcGf | 175 | UAUAAACUUUAACUCGA | 775 | gsgscaucGfaGfuUfaaag | 575 | GGCAUCGAGUUAAAG |
| 000535 | | | augccsasc | | UGCCAC | | uuuaua | | UUUAUA |
| SRS- | 2242 | 376 | usUfsagggGfaaauAfuAfaAf | 176 | UUAGGGGAAAUAUAAAC | 776 | usasaaguUfuAfuAfuuu | 576 | UAAAGUUUAUAUUUC |
| 000536 | | | cuuuasasc | | UUUAAC | | ccccuaa | | CCCUAA |
| SRS- | 2560 | 377 | usCfscuuuAfacaaAfuGfgGf | 177 | UCCUUUAACAAAUGGGU | 777 | ususaaacCfcAfuUfugu | 577 | UUAAACCCAUUUGUU |
| 000537 | | | uuuaasusu | | UUAAUU | | uaaagga | | AAAGGA |
| SRS- | 2568 | 378 | usCfsacuaUfauccUfuUfaAf | 178 | UCACUAUAUCCUUUAAC | 778 | asusuuguUfaAfaGfgau | 578 | AUUUGUUAAAGGAUA |
| 000538 | | | caaausgsg | | AAAUGG | | auaguga | | UAGUGA |
| SRS- | 2569 | 379 | usGfscacuAfuaucCfuUfuAf | 179 | UGCACUAUAUCCUUUAA | 779 | ususuguuAfaAfgGfaua | 579 | UUUGUUAAAGGAUAU |
| 000539 | | | acaaasusg | | CAAAUG | | uagugca | | AGUGCA |
| SRS- | 2571 | 380 | usGfsggcaCfuauaUfcCfuUf | 180 | UGGGCACUAUAUCCUUU | 780 | usgsuuaaAfgGfaUfaua | 580 | UGUUAAAGGAUAUAG |
| 000540 | | | uaacasasa | | AACAAA | | gugccca | | UGCCCA |
| SRS- | 2572 | 381 | usUfsgggcAfcuauAfuCfcUf | 181 | UUGGGCACUAUAUCCUU | 781 | gsusuaaaGfgAfuAfuag | 581 | GUUAAAGGAUAUAGU |
| 000541 | | | uuaacsasa | | UAACAA | | ugcccaa | | GCCCAA |
| SRS- | 2576 | 382 | usAfsacuuGfggcaCfuAfuAf | 182 | UAACUUGGGCACUAUAU | 782 | asasggauAfuAfgUfgcc | 582 | AAGGAUAUAGUGCCC |
| 000542 | | | uccuususa | | CCUUUA | | caaguua | | AAGUUA |
| SRS- | 2577 | 383 | usUfsaacuUfgggcAfcUfaUf | 183 | UUAACUUGGGCACUAUA | 783 | asgsgauaUfaGfuGfccca | 583 | AGGAUAUAGUGCCCA |
| 000543 | | | auccususu | | UCCUUU | | aguuaa | | AGUUAA |
| SRS- | 2578 | 384 | usAfsuaacUfugggCfaCfuAf | 184 | UAUAACUUGGGCACUAU | 784 | gsgsauauAfgUfgCfccaa | 584 | GGAUAUAGUGCCCAA |
| 000544 | | | uauccsusu | | AUCCUU | | guuaua | | GUUAUA |
| SRS- | 2579 | 385 | usUfsauaaCfuuggGfcAfcUf | 185 | UUAUAACUUGGGCACUA | 785 | gsasuauaGfuGfcCfcaag | 585 | GAUAUAGUGCCCAAG |
| 000545 | | | auaucscsu | | UAUCCU | | uuauaa | | UUAUAA |
| SRS- | 2598 | 386 | usUfsgacaAfagguAfgGfuCf | 186 | UUGACAAAGGUAGGUCA | 786 | asusggugAfcCfuAfccu | 586 | AUGGUGACCUACCUUU |
| 000546 | | | accausasu | | CCAUAU | | uugucaa | | GUCAA |
| SRS- | 2599 | 387 | usUfsugacAfaaggUfaGfgUf | 187 | UUUGACAAAGGUAGGUC | 787 | usgsgugaCfcUfaCfcuu | 587 | UGGUGACCUACCUUUG |
| 000547 | | | caccasusa | | ACCAUA | | ugucaaa | | UCAAA |
| SRS- | 2600 | 388 | usAfsuugaCfaaagGfuAfgGf | 188 | UAUUGACAAAGGUAGGU | 788 | gsgsugacCfuAfcCfuuu | 588 | GGUGACCUACCUUUGU |
| 000548 | | | ucaccsasu | | CACCAU | | gucaaua | | CAAUA |
| SRS- | 2640 | 389 | usGfsacauGfuauaUfuGfgAf | 189 | UGACAUGUAUAUUGGAU | 789 | asasuuauCfcAfaUfauac | 589 | AAUUAUCCAAUAUAC |
| 000549 | | | uaauususg | | AAUUUG | | auguca | | AUGUCA |
| SRS- | 2772 | 390 | usUfsagucUfguggUfcCfuGf | 190 | UUAGUCUGUGGUCCUGA | 790 | asusuuuc AfgGfaCfcaca | 590 | AUUUUCAGGACCACAG |
| 000550 | | | aaaaususa | | AAAUUA | | gacuaa | | ACUAA |
| SRS- | 2775 | 391 | usGfscuuaGfucugUfgGfuCf | 191 | UGCUUAGUCUGUGGUCC | 791 | ususcaggAfcCfaCfagac | 591 | UUCAGGACCACAGACU |
| 000551 | | | cugaasasa | | UGAAAA | | uaagca | | AAGCA |
| SRS- | 2778 | 392 | usAfscagcUfuaguCfuGfuGf | 192 | UACAGCUUAGUCUGUGG | 792 | asgsgaccAfcAfgAfcuaa | 592 | AGGACCACAGACUAAG |
| 000552 | | | guccusgsa | | UCCUGA | | gcugua | | CUGUA |
| SRS- | 2813 | 393 | usGfsuauuCfuggcCfcUfaAf | 193 | UGUAUUCUGGCCCUAAA | 793 | ususuuuuUfaGfgGfcca | 593 | UUUUUUUAGGGCCAG |
| 000553 | | | aaaaasusc | | AAAAUC | | gaauaca | | AAUACA |
| SRS- | 2816 | 394 | usUfsugguAfuucuGfgCfcCf | 194 | UUUGGUAUUCUGGCCCU | 794 | ususuuagGfgCfcAfgaa | 594 | UUUUAGGGCCAGAAU |
| 000554 | | | uaaaasasa | | AAAAAA | | uaccaaa | | ACCAAA |
| SRS- | 2817 | 395 | usUfsuuggUfauucUfgGfcCf | 195 | UUUUGGUAUUCUGGCCC | 795 | ususuaggGfcCfaGfaaua | 595 | UUUAGGGCCAGAAUA |
| 000555 | | | cuaaasasa | | UAAAAA | | ccaaaa | | CCAAAA |
| SRS- | 2892 | 396 | usGfsaagcAfacucAfuAfuAf | 196 | UGAAGCAACUCAUAUAU | 796 | ususuaauAfuAfuGfagu | 596 | UUUAAUAUAUGAGUU |
| 000556 | | | uuaaasusa | | UAAAUA | | ugcuuca | | GCUUCA |

Note:
the target position is relative to human transcript NM_014495.4; the corresponding sequence of a certain SEQ ID NO. is located on its right column of the same row. “A″ refers to adenosine-3′-phosphate; “a″ refers to 2′-O-methyladenosine-3′-phosphate; “Af” refers to 2′-fluoroadenosine-3′-phosphate; “dA″ refers to 2′-deoxyadenosine-3-phosphate; “C″ refers to cytidine-3′-phosphate; “c″ refers to 2′-O-methylcytidine-3′-phosphate; “Cf″ refers to 2′-fluorocytidine-3′-phosphate; “dC″ refers to 2′-deoxycytidine-3′-phosphate; “G″ refers to guanosine-3′-phosphate; “g″ refers to 2′-O-methylguanosine-3′-phosphate; “Gf″ refers to 2′-fluoroguanosine-3′-phosphate; “dG″ refers to 2′-deoxyguanosine-3′-phosphate; “U″ refers to uridine-3′-phosphate; “u″ refers to 2′-O-methyluridine-3′-phosphate; “Uf″ refers to 2′-fluorouridine-3′-phosphate; “dU″ refers to 2′-deoxyuridine-3′-phosphate; “T″ refers to 5-methyluridine-3′-phosphate; “t″ refers to 2′-O-methyl-5-methyluridine-3′-phosphate; “Tf″ refers to 2′-fluoro-5-methyluridine-3′-phosphate; “dT″ refers to thymidine-3′-phosphate; “s″ refers to 3′-phosphorothioate; The “Target Position in NM_014495.4″ is defined as the 5′ position of a 21-mer target site in human transcript (NCBI Reference Sequence No: NM_014495.4).
Note that the passenger structure (sense structure) code or passenger strand (sense strand) sequence is coupled to a targeting moiety (e.g., GalNAc or galactose) at the 3′ end of the passenger strand.

TABLE 2
siRNAs Evaluated at 10 pt Dose Response in vitro in primary human hepatocytes

| | | SEQ | Guide/Antisense | SEQ | Guide/Antisense | SEQ | Passenger/Sense | SEQ | Passenger/Sense |
|---|---|---|---|---|---|---|---|---|---|
| | Target | ID | Structure Code | ID | Base Sequence | ID | Structure Code | ID | Base Sequence |
| Duplex ID | Position | NO. | (5′-3′) | NO. | (5′-3′) | NO. | (5′-3′) | NO. | (5′-3′) |
| SRS-000363 | 47 | 202 | usGfsgagcUfuaauUfgUf | 2 | UGGAGCUUAAUUGU | 602 | asasuguuCfaCfaAfu | 402 | AAUGUUCACAAUU |
| | | | gAfacauususu | | GAACAUUUU | | uaagcucca | | AAGCUCCA |
| SRS-000364 | 49 | 203 | usAfsaggaGfcuuaAfuUf | 3 | UAAGGAGCUUAAUU | 603 | usgsuucaCfaAfuUfa | 403 | UGUUCACAAUUAA |
| | | | gUfgaacasusu | | GUGAACAUU | | agcuccuua | | GCUCCUUA |
| SRS-000366 | 56 | 205 | usUfsaaaaAfgaagGfaGf | 5 | UUAAAAAGAAGGAG | 605 | asasuuaaGfcUfcCfuu | 405 | AAUUAAGCUCCUU |
| | | | cUfuaauusgsu | | CUUAAUUGU | | cuuuuuaa | | CUUUUUAA |
| SRS-000368 | 71 | 207 | usUfsaacuAfgaggAfaCf | 7 | UUAACUAGAGGAAC | 607 | ususuuauUfgUfuCfc | 407 | UUUUAUUGUUCCU |
| | | | aAfuaaaasasg | | AAUAAAAAG | | ucuaguuaa | | CUAGUUAA |
| SRS-000369 | 72 | 208 | usAfsuaacUfagagGfaAf | 8 | UAUAACUAGAGGAA | 608 | ususuauuGfuUfcCfu | 408 | UUUAUUGUUCCUC |
| | | | cAfauaaasasa | | CAAUAAAAA | | cuaguuaua | | UAGUUAUA |
| SRS-000371 | 149 | 210 | usCfsuaacAfuagcAfaAf | 10 | UCUAACAUAGCAAA | 610 | asuscaagAfuUfuGfc | 410 | AUCAAGAUUUGCU |
| | | | uCfuugaususu | | UCUUGAUUU | | uauguuaga | | AUGUUAGA |
| SRS-000372 | 151 | 211 | usGfsucuaAfcauaGfcAf | 11 | UGUCUAACAUAGCA | 611 | csasagauUfuGfcUfa | 411 | CAAGAUUUGCUAU |
| | | | aAfucuugsasu | | AAUCUUGAU | | uguuagaca | | GUUAGACA |
| SRS-000375 | 154 | 214 | usAfsucguCfuaacAfuAf | 14 | UAUCGUCUAACAUA | 614 | gsasuuugCfuAfuGfu | 414 | GAUUUGCUAUGUU |
| | | | gCfaaaucsusu | | GCAAAUCUU | | uagacgaua | | AGACGAUA |
| SRS-000376 | 155 | 215 | usCfsaucgUfcuaaCfaUf | 15 | UCAUCGUCUAACAU | 615 | asusuugcUfaUfgUfu | 415 | AUUUGCUAUGUUA |
| | | | aGfcaaauscsu | | AGCAAAUCU | | agacgauga | | GACGAUGA |
| SRS-000379 | 159 | 218 | usUfsuuacAfucguCfuAf | 18 | UUUUACAUCGUCUA | 618 | gscsuaugUfuAfgAfc | 418 | GCUAUGUUAGACG |
| | | | aCfauagcsasa | | ACAUAGCAA | | gauguaaaa | | AUGUAAAA |
| SRS-000381 | 161 | 220 | usUfsuuuuAfcaucGfuCf | 20 | UUUUUUACAUCGUC | 620 | usasuguuAfgAfcGfa | 420 | UAUGUUAGACGAU |
| | | | uAfacauasgsc | | UAACAUAGC | | uguaaaaaa | | GUAAAAAA |
| SRS-000382 | 163 | 221 | usAfsauuuUfuacaUfcGf | 21 | UAAUUUUUACAUCG | 621 | usgsuuagAfcGfaUfg | 421 | UGUUAGACGAUGU |
| | | | uCfuaacasusa | | UCUAACAUA | | uaaaaauua | | AAAAAUUA |
| SRS-000383 | 165 | 222 | usAfsaaauUfuuuaCfaUf | 22 | UAAAAUUUUUACAU | 622 | ususagacGfaUfgUfa | 422 | UUAGACGAUGUAA |
| | | | cGfucuaascsa | | CGUCUAACA | | aaaauuuua | | AAAUUUUA |
| SRS-000393 | 204 | 232 | usUfscuuuAfagacCfaUf | 32 | UUCUUUAAGACCAU | 632 | ususgggaCfaUfgGfu | 432 | UUGGGACAUGGUC |
| | | | gUfcccaascsu | | GUCCCAACU | | cuuaaagaa | | UUAAAGAA |
| SRS-000395 | 207 | 234 | usAfsagucUfuuaaGfaCf | 34 | UAAGUCUUUAAGAC | 634 | gsgsacauGfgUfcUfu | 434 | GGACAUGGUCUUA |
| | | | cAfuguccscsa | | CAUGUCCCA | | aaagacuua | | AAGACUUA |
| SRS-000403 | 282 | 242 | usAfsgaucAfuaaaAfaGf | 42 | UAGAUCAUAAAAAG | 642 | gsasucagUfcUfuUfu | 442 | GAUCAGUCUUUUU |
| | | | aCfugaucsasa | | ACUGAUCAA | | uaugaucua | | AUGAUCUA |
| SRS-000404 | 283 | 243 | usUfsagauCfauaaAfaAf | 43 | UUAGAUCAUAAAAA | 643 | asuscaguCfuUfuUfu | 443 | AUCAGUCUUUUUA |
| | | | gAfcugauscsa | | GACUGAUCA | | augaucuaa | | UGAUCUAA |
| SRS-000405 | 354 | 244 | usUfsugacUfuguaGfuU | 44 | UUUGACUUGUAGUU | 644 | ascsauauAfaAfcUfac | 444 | ACAUAUAAACUAC |
| | | | fuAfuaugusasg | | UAUAUGUAG | | aagucaaa | | AAGUCAAA |
| SRS-000406 | 396 | 245 | usUfsuugaGfuugaGfuU | 45 | UUUUGAGUUGAGUU | 645 | uscsacuuGfaAfcUfca | 445 | UCACUUGAACUCA |
| | | | fcAfagugascsa | | CAAGUGACA | | acucaaaa | | ACUCAAAA |
| SRS-000407 | 412 | 246 | usUfsaggaGfgcuuUfcAf | 46 | UUAGGAGGCUUUCA | 646 | csasaaacUfuGfaAfag | 446 | CAAAACUUGAAAG |
| | | | aGfuuuugsasg | | AGUUUUGAG | | ccuccuaa | | CCUCCUAA |
| SRS-000411 | 473 | 250 | usUfsuaagUfuaguUfaGf | 50 | UUUAAGUUAGUUAG | 650 | asgsagcaAfcUfaAfcu | 450 | AGAGCAACUAACU |
| | | | uUfgcucususc | | UUGCUCUUC | | aacuuaaa | | AACUUAAA |
| SRS-000412 | 474 | 251 | usAfsuuaaGfuuagUfuA | 51 | UAUUAAGUUAGUUA | 651 | gsasgcaaCfuAfaCfua | 451 | GAGCAACUAACUA |
| | | | fgUfugcucsusu | | GUUGCUCUU | | acuuaaua | | ACUUAAUA |
| SRS-000413 | 485 | 252 | usGfsuugaUfuuugAfaU | 52 | UGUUGAUUUUGAAU | 652 | usasacuuAfaUfuCfaa | 452 | UAACUUAAUUCAA |
| | | | fuAfaguuasgsu | | UAAGUUAGU | | aaucaaca | | AAUCAACA |
| SRS-000414 | 520 | 253 | usAfsagugAfaguuAfcU | 53 | UAAGUGAAGUUACU | 653 | ascsccagAfaGfuAfac | 453 | ACCCAGAAGUAAC |
| | | | fuCfugggusgsu | | UCUGGGUGU | | uucacuua | | UUCACUUA |
| SRS-000415 | 521 | 254 | usUfsaaguGfaaguUfaCf | 54 | UUAAGUGAAGUUAC | 654 | cscscagaAfgUfaAfcu | 454 | CCCAGAAGUAACU |
| | | | uUfcugggsusg | | UUCUGGGUG | | ucacuuaa | | UCACUUAA |
| SRS-000416 | 553 | 255 | usGfsaugcUfauuaUfcUf | 55 | UGAUGCUAUUAUCU | 655 | asasaaacAfaGfaUfaa | 455 | AAAAACAAGAUAA |
| | | | uGfuuuuuscsu | | UGUUUUUCU | | uagcauca | | UAGCAUCA |
| SRS-000417 | 555 | 256 | usUfsugauGfcuauUfaUf | 56 | UUUGAUGCUAUUAU | 656 | asasacaaGfaUfaAfua | 456 | AAACAAGAUAAUA |
| | | | cUfuguuususu | | CUUGUUUUU | | gcaucaaa | | GCAUCAAA |
| SRS-000421 | 615 | 260 | usAfsuuugAfcuauGfcU | 60 | UAUUUGACUAUGCU | 660 | asasccaaCfaGfcAfua | 460 | AACCAACAGCAUA |
| | | | fgUfugguususa | | GUUGGUUUA | | gucaaaua | | GUCAAAUA |
| SRS-000436 | 897 | 276 | usUfscuauUfcgauGfuUf | 76 | UUCUAUUCGAUGUU | 676 | ususaauuCfaAfcAfu | 476 | UUAAUUCAACAUC |
| | | | gAfauuaasusg | | GAAUUAAUG | | cgaauagaa | | GAAUAGAA |
| SRS-000437 | 898 | 277 | usAfsucuaUfucgaUfgUf | 77 | UAUCUAUUCGAUGU | 677 | usasauucAfaCfaUfcg | 477 | UAAUUCAACAUCG |
| | | | uGfaauuasasu | | UGAAUUAAU | | aauagaua | | AAUAGAUA |
| SRS-000456 | 942 | 296 | usCfscauaUfuuguAfgUf | 96 | UCCAUAUUUGUAGU | 696 | usgsggagAfaCfuAfc | 496 | UGGGAGAACUACA |
| | | | uCfucccascsg | | UCUCCCACG | | aaauaugga | | AAUAUGGA |
| SRS-000458 | 966 | 298 | usAfsauucUfccauCfaAf | 98 | UAAUUCUCCAUCAA | 698 | gsgsgaggCfuUfgAfu | 498 | GGGAGGCUUGAUG |
| | | | gCfcucccsasa | | GCCUCCCAA | | ggagaauua | | GAGAAUUA |
| SRS-000467 | 1007 | 307 | usAfsuugcUfucacUfaUf | 107 | UAUUGCUUCACUAU | 707 | asusacucCfaUfaGfug | 507 | AUACUCCAUAGUG |
| | | | gGfaguausasu | | GGAGUAUAU | | aagcaaua | | AAGCAAUA |
| SRS-000468 | 1012 | 308 | usAfsuuagAfuugcUfuC | 108 | UAUUAGAUUGCUUC | 708 | cscsauagUfgAfaGfca | 508 | CCAUAGUGAAGCA |
| | | | faCfuauggsasg | | ACUAUGGAG | | aucuaaua | | AUCUAAUA |
| SRS-000469 | 1014 | 309 | usUfsaauuAfgauuGfcUf | 109 | UUAAUUAGAUUGCU | 709 | asusagugAfaGfcAfa | 509 | AUAGUGAAGCAAU |
| | | | uCfacuausgsg | | UCACUAUGG | | ucuaauuaa | | CUAAUUAA |
| SRS-000471 | 1098 | 311 | usUfsugguUfucguGfaU | 111 | UUUGGUUUCGUGAU | 711 | ususgggaAfaUfcAfc | 511 | UUGGGAAAUCACG |
| | | | fuUfcccaasgsu | | UUCCCAAGU | | gaaaccaaa | | AAACCAAA |
| SRS-000473 | 1101 | 313 | usUfsaguuGfguuuCfgU | 113 | UUAGUUGGUUUCGU | 713 | gsgsaaauCfaCfgAfaa | 513 | GGAAAUCACGAAA |
| | | | fgAfuuuccscsa | | GAUUUCCCA | | ccaacuaa | | CCAACUAA |
| SRS-000474 | 1103 | 314 | usUfsauagUfugguUfuC | 114 | UUAUAGUUGGUUUC | 714 | asasaucaCfgAfaAfcc | 514 | AAAUCACGAAACC |
| | | | fgUfgauuuscsc | | GUGAUUUCC | | aacuauaa | | AACUAUAA |
| SRS-000495 | 1179 | 335 | usCfsaaguAfgaaaAfcAf | 135 | UCAAGUAGAAAACA | 735 | gsasuuugGfuGfuUfu | 535 | GAUUUGGUGUUUU |
| | | | cCfaaaucsusu | | CCAAAUCUU | | ucuacuuga | | CUACUUGA |
| SRS-000505 | 1357 | 345 | usAfsgaguAfuaacCfuUf | 145 | UAGAGUAUAACCUU | 745 | asasaaugGfaAfgGfu | 545 | AAAAUGGAAGGUU |
| | | | cCfauuuusgsa | | CCAUUUUGA | | uauacucua | | AUACUCUA |
| SRS-000506 | 1358 | 346 | usUfsagagUfauaaCfcUf | 146 | UUAGAGUAUAACCU | 746 | asasauggAfaGfgUfu | 546 | AAAUGGAAGGUUA |
| | | | uCfcauuususg | | UCCAUUUUG | | auacucuaa | | UACUCUAA |
| SRS-000508 | 1363 | 348 | usUfsuuuaUfagagUfaUf | 148 | UUUUUAUAGAGUAU | 748 | gsasagguUfaUfaCfu | 548 | GAAGGUUAUACUC |
| | | | aAfccuucscsa | | AACCUUCCA | | cuauaaaaa | | UAUAAAAA |
| SRS-000509 | 1365 | 349 | usGfsauuuUfauagAfgU | 149 | UGAUUUUAUAGAGU | 749 | asgsguuaUfaCfuCfu | 549 | AGGUUAUACUCUA |
| | | | faUfaaccususc | | AUAACCUUC | | auaaaauca | | UAAAAUCA |
| SRS-000513 | 1384 | 353 | usAfsuggaUfcaacAfuUf | 153 | UAUGGAUCAACAUU | 753 | csasaccaAfaAfuGfuu | 553 | CAACCAAAAUGUU |
| | | | uUfgguugsasu | | UUGGUUGAU | | gauccaua | | GAUCCAUA |
| SRS-000517 | 1494 | 357 | usAfsggauUfuaauAfcCf | 157 | UAGGAUUUAAUACC | 757 | asusaaucUfgGfuAfu | 557 | AUAAUCUGGUAUU |
| | | | aGfauuaususa | | AGAUUAUUA | | uaaauccua | | AAAUCCUA |
| SRS-000518 | 1496 | 358 | usUfsaaggAfuuuaAfuA | 158 | UUAAGGAUUUAAUA | 758 | asasucugGfuAfuUfa | 558 | AAUCUGGUAUUAA |
| | | | fcCfagauusasu | | CCAGAUUAU | | aauccuuaa | | AUCCUUAA |
| SRS-000520 | 1563 | 360 | usUfsuguaUfguuuAfaU | 160 | UUUGUAUGUUUAAU | 760 | asusuuaaGfaUfuAfa | 560 | AUUUAAGAUUAAA |
| | | | fcUfuaaausasg | | CUUAAAUAG | | acauacaaa | | CAUACAAA |
| SRS-000521 | 1566 | 361 | usUfsgauuGfuaugUfuU | 161 | UUGAUUGUAUGUUU | 761 | usasagauUfaAfaCfau | 561 | UAAGAUUAAACAU |
| | | | faAfucuuasasa | | AAUCUUAAA | | acaaucaa | | ACAAUCAA |

Note:
the target position is relative to human transcript NM_014495.4; the corresponding sequence of a certain SEQ ID NO. is located on its right column of the same row. “A” refers to adenosine-3′-phosphate; “a” refers to 2′-O-methyladenosine-3′-phosphate; “Af” refers to 2′-fluoroadenosine-3′-phosphate; “dA” refers to 2′-deoxyadenosine-3-phosphate; “C” refers to cytidine-3′-phosphate; “c” refers to 2′-O-methylcytidine-3′-phosphate; “Cf” refers to 2′-fluorocytidine-3′-phosphate; “dC” refers to 2′-deoxycytidine-3′-phosphate; “G” refers to guanosine-3′-phosphate; “g” refers to 2′-O-methylguanosine-3′-phosphate; “Gf” refers to 2′-fluoroguanosine-3′-phosphate; “dG” refers to 2′-deoxyguanosine-3′-phosphate; “U” refers to uridine-3′-phosphate; “u” refers to 2′-O-methyluridine-3′-phosphate; “Uf” refers to 2′-fluorouridine-3′-phosphate; “dU” refers to 2′-deoxyuridine-3′-phosphate; “T“ refers to 5-methyluridine-3′-phosphate; “t” refers to 2′-O-methyl-5-methyluridine-3′-phosphate; “Tf” refers to 2′-fluoro-5-methyluridine-3′-phosphate; “dT” refers to thymidine-3′-phosphate; “s” refers to 3′-phosphorothioate; The “Target Position in NM_014495.4” is defined as the 5′ position of a 21-mer target site in human transcript (NCBI Reference Sequence No: NM_014495.4).
Note that the passenger structure (sense structure) code or passenger strand (sense strand) sequence is coupled to a targeting moiety (e.g., GalNAc or galactose) at the 3′ end of the passenger strand.

TABLE 3
siRNAs Selected for In Vivo Humanized Mouse Model Screening

| | | SEQ | | SEQ | Guide/Antisense | SEQ | | SEQ | Passenger/Sense |
|---|---|---|---|---|---|---|---|---|---|
| Duplex | Target | ID | Guide/Antisense Structure Code | ID | Base Sequence | ID | Passenger/Sense Structure | ID | Base Sequence |
| ID | Position | NO. | (5′-3′) | NO. | (5′-3′) | NO. | Code (5′-3′) | NO. | (5′-3′) |
| SRS- | 56 | 205 | usUfsaaaaAfgaagGfaGfcUfuaauus | 5 | UUAAAAAGAAGGAGCUUAAU | 605 | asasuuaaGfcUfcCfuucuuuuuaa | 405 | AAUUAAGCUCCUUCUUUUU |
| 000559 | | | gsu | | UGU | | | | AA |
| SRS- | 71 | 207 | usUfsaacuAfgaggAfaCfaAfuaaaas | 7 | UUAACUAGAGGAACAAUAAA | 607 | ususuuauUfgUfuCfcucuaguua | 407 | UUUUAUUGUUCCUCUAGUU |
| 000560 | | | asg | | AAG | | a | | AA |
| SRS- | 72 | 208 | usAfsuaacUfagagGfaAfcAfauaaas | 8 | UAUAACUAGAGGAACAAUAA | 608 | ususuauuGfuUfcCfucuaguuau | 408 | UUUAUUGUUCCUCUAGUUA |
| 000561 | | | asa | | AAA | | a | | UA |
| SRS- | 151 | 211 | usGfsucuaAfcauaGfcAfaAfucuug | 11 | UGUCUAACAUAGCAAAUCUU | 611 | csasagauUfuGfcUfauguuagaca | 411 | CAAGAUUUGCUAUGUUAGA |
| 000650 | | | sasu | | GAU | | | | CA |
| SRS- | 159 | 218 | usUfsuuacAfucguCfuAfaCfauagcs | 18 | UUUUACAUCGUCUAACAUAG | 618 | gscsuaugUfuAfgAfcgauguaaa | 418 | GCUAUGUUAGACGAUGUAA |
| 000563 | | | asa | | CAA | | a | | AA |
| SRS- | 161 | 220 | usUfsuuuuAfcaucGfuCfuAfacaua | 20 | UUUUUUACAUCGUCUAACAU | 620 | usasuguuAfgAfcGfauguaaaaa | 420 | UAUGUUAGACGAUGUAAA |
| 000564 | | | sgsc | | AGC | | a | | AAA |
| SRS- | 165 | 222 | usAfsaaauUfuuuaCfaUfcGfucuaas | 22 | UAAAAUUUUUACAUCGUCUA | 622 | ususagacGfaUfgUfaaaaauuuua | 422 | UUAGACGAUGUAAAAAUU |
| 000566 | | | csa | | ACA | | | | UUA |
| SRS- | 269 | 240 | usAfscugaUfcaaaUfaUfgUfugagu | 40 | UACUGAUCAAAUAUGUUGAG | 640 | ascsucaaCfaUfaUfuugaucagua | 440 | ACUCAACAUAUUUGAUCAG |
| 000651 | | | susu | | UUU | | | | UA |
| SRS- | 283 | 243 | usUfsagauCfauaaAfaAfgAfcugaus | 43 | UUAGAUCAUAAAAAGACUGA | 643 | asuscaguCfuUfuUfuaugaucua | 443 | AUCAGUCUUUUUAUGAUCU |
| 000568 | | | csa | | UCA | | a | | AA |
| SRS- | 354 | 244 | usUfsugacUfuguaGfuUfuAfuaugu | 44 | UUUGACUUGUAGUUUAUAUG | 644 | ascsauauAfaAfcUfacaagucaaa | 444 | ACAUAUAAACUACAAGUCA |
| 000569 | | | sasg | | UAG | | | | AA |
| SRS- | 396 | 245 | usUfsuugaGfuugaGfuUfcAfaguga | 45 | UUUUGAGUUGAGUUCAAGUG | 645 | uscsacuuGfaAfcUfcaacucaaaa | 445 | UCACUUGAACUCAACUCAA |
| 000570 | | | scsa | | ACA | | | | AA |
| SRS- | 412 | 246 | usUfsaggaGfgcuuUfcAfaGfuuuug | 46 | UUAGGAGGCUUUCAAGUUUU | 646 | csasaaacUfuGfaAfagccuccuaa | 446 | CAAAACUUGAAAGCCUCCU |
| 000652 | | | sasg | | GAG | | | | AA |
| SRS- | 473 | 250 | usUfsuaagUfuaguUfaGfuUfgcucu | 50 | UUUAAGUUAGUUAGUUGCUC | 650 | asgsagcaAfcUfaAfcuaacuuaaa | 450 | AGAGCAACUAACUAACUUA |
| 000571 | | | susc | | UUC | | | | AA |
| SRS- | 485 | 252 | usGfsuugaUfuuugAfaUfuAfaguua | 52 | UGUUGAUUUUGAAUUAAGUU | 652 | usasacuuAfaUfuCfaaaaucaaca | 452 | UAACUUAAUUCAAAAUCAA |
| 000653 | | | sgsu | | AGU | | | | CA |
| SRS- | 520 | 253 | usAfsagugAfaguuAfcUfuCfugggu | 53 | UAAGUGAAGUUACUUCUGGG | 653 | ascsccagAfaGfuAfacuucacuua | 453 | ACCCAGAAGUAACUUCACU |
| 000654 | | | sgsu | | UGU | | | | UA |
| SRS- | 555 | 256 | usUfsugauGfcuauUfaUfcUfuguuu | 56 | UUUGAUGCUAUUAUCUUGUU | 656 | asasacaaGfaUfaAfuagcaucaaa | 456 | AAACAAGAUAAUAGCAUCA |
| 000572 | | | susu | | UUU | | | | AA |
| SRS- | 1012 | 308 | usAfsuuagAfuugcUfuCfaCfuaugg | 108 | UAUUAGAUUGCUUCACUAUG | 708 | cscsauagUfgAfaGfcaaucuaaua | 508 | CCAUAGUGAAGCAAUCUAA |
| 000655 | | | sasg | | GAG | | | | UA |
| SRS- | 1014 | 309 | usUfsaauuAfgauuGfcUfuCfacuau | 109 | UUAAUUAGAUUGCUUCACUA | 709 | asusagugAfaGfcAfaucuaauuaa | 509 | AUAGUGAAGCAAUCUAAUU |
| 000575 | | | sgsg | | UGG | | | | AA |
| SRS- | 1101 | 313 | usUfsaguuGfguuuCfgUfgAfuuucc | 113 | UUAGUUGGUUUCGUGAUUUC | 713 | gsgsaaauCfaCfgAfaaccaacuaa | 513 | GGAAAUCACGAAACCAACU |
| 000656 | | | scsa | | CCA | | | | AA |
| SRS- | 1103 | 314 | usUfsauagUfugguUfuCfgUfgauuu | 114 | UUAUAGUUGGUUUCGUGAUU | 714 | asasaucaCfgAfaAfccaacuauaa | 514 | AAAUCACGAAACCAACUAU |
| 000657 | | | scsc | | UCC | | | | AA |
| SRS- | 1357 | 345 | usAfsgaguAfuaacCfuUfcCfauuuu | 145 | UAGAGUAUAACCUUCCAUUU | 745 | asasaaugGfaAfgGfuuauacucua | 545 | AAAAUGGAAGGUUAUACUC |
| 000658 | | | sgsa | | UGA | | | | UA |
| SRS- | 1358 | 346 | usUfsagagUfauaaCfcUfuCfcauuus | 146 | UUAGAGUAUAACCUUCCAUU | 746 | asasauggAfaGfgUfuauacucuaa | 546 | AAAUGGAAGGUUAUACUCU |
| 000576 | | | usg | | UUG | | | | AA |
| SRS- | 1363 | 348 | usUfsuuuaUfagagUfaUfaAfecuuc | 148 | UUUUUAUAGAGUAUAACCUU | 748 | gsasagguUfaUfaCfucuauaaaaa | 548 | GAAGGUUAUACUCUAUAAA |
| 000659 | | | scsa | | CCA | | | | AA |
| SRS- | 1384 | 353 | usAfsuggaUfcaacAfuUfuUfgguug | 153 | UAUGGAUCAACAUUUUGGUU | 753 | csasaccaAfaAfuGfuugauccaua | 553 | CAACCAAAAUGUUGAUCCA |
| 000577 | | | sasu | | GAU | | | | UA |
| SRS- | 1494 | 357 | usAfsggauUfuaauAfcCfaGfauuau | 157 | UAGGAUUUAAUACCAGAUUA | 757 | asusaaucUfgGfuAfuuaaauccua | 557 | AUAAUCUGGUAUUAAAUCC |
| 000661 | | | susa | | UUA | | | | UA |
| SRS- | 1496 | 358 | usUfsaaggAfuuuaAfuAfcCfagauu | 158 | UUAAGGAUUUAAUACCAGAU | 758 | asasucugGfuAfuUfaaauccuuaa | 558 | AAUCUGGUAUUAAAUCCUU |
| 000578 | | | sasu | | UAU | | | | AA |
| SRS- | 54 | 808 | usAfsaaagAfaggaGfcUfuAfauugu | 797 | UAAAAGAAGGAGCUUAAUUG | 830 | ascsaauuAfaGfcUfccuucuuuua | 819 | ACAAUUAAGCUCCUUCUUU |
| 001803 | | | sgsa | | UGA | | | | UA |
| SRS- | 158 | 809 | usUfsuacaUfcgucUfaAfcAfuagcas | 798 | UUUACAUCGUCUAACAUAGC | 831 | usgscuauGfuUfaGfacgauguaa | 820 | UGCUAUGUUAGACGAUGUA |
| 001804 | | | asa | | AAA | | a | | AA |
| SRS- | 267 | 810 | usUfsgaucAfaauaUfgUfuGfaguuu | 799 | UUGAUCAAAUAUGUUGAGUU | 832 | asasacucAfaCfaUfauuugaucaa | 821 | AAACUCAACAUAUUUGAUC |
| 001805 | | | susu | | UUU | | | | AA |
| SRS- | 281 | 811 | usGfsaucaUfaaaaAfgAfcUfgaucas | 800 | UGAUCAUAAAAAGACUGAUC | 833 | usgsaucaGfuCfuUfuuuaugauc | 822 | UGAUCAGUCUUUUUAUGAU |
| 001806 | | | asa | | AAA | | a | | CA |
| SRS- | 919 | 812 | usUfsucauUfgaagUfuUfuGfugauc | 801 | UUUCAUUGAAGUUUUGUGAU | 834 | gsasucacAfaAfaCfuucaaugaaa | 823 | GAUCACAAAACUUCAAUGA |
| 001807 | | | scsa | | CCA | | | | AA |
| SRS- | 1007 | 813 | usAfsuugcUfucacUfaUfgGfaguau | 802 | UAUUGCUUCACUAUGGAGUA | 835 | asusacucCfaUfaGfugaagcaaua | 824 | AUACUCCAUAGUGAAGCAA |
| 001808 | | | sasu | | UAU | | | | UA |
| SRS- | 1008 | 814 | usGfsauugCfuucaCfuAfuGfgagua | 803 | UGAUUGCUUCACUAUGGAGU | 836 | usascuccAfuAfgUfgaagcaauca | 825 | UACUCCAUAGUGAAGCAAU |
| 001809 | | | susa | | AUA | | | | CA |
| SRS- | 1013 | 815 | usAfsauuaGfauugCfuUfcAfcuaug | 804 | UAAUUAGAUUGCUUCACUAU | 837 | csasuaguGfaAfgCfaaucuaauua | 826 | CAUAGUGAAGCAAUCUAAU |
| 001810 | | | sgsa | | GGA | | | | UA |
| SRS- | 1099 | 816 | usGfsuuggUfuucgUfgAfuUfuccca | 805 | UGUUGGUUUCGUGAUUUCCC | 838 | usgsggaaAfuCfaCfgaaaccaaca | 827 | UGGGAAAUCACGAAACCAA |
| 001811 | | | sasg | | AAG | | | | CA |
| SRS- | 1102 | 817 | usAfsuaguUfgguuUfcGfuGfauuuc | 806 | UAUAGUUGGUUUCGUGAUUU | 839 | gsasaaucAfcGfaAfaccaacuaua | 828 | GAAAUCACGAAACCAACUA |
| 001812 | | | SCSC | | CCC | | | | UA |
| SRS- | 1357 | 858 | usAfsgagu(T-NAc) | 850 | UAGAGUUAACCUUCCAUUUU | 881 | asasaaugGfaAfgGfuuaaacucua | 870 | AAAAUGGAAGGUUAAACUC |
| 002024 | | | uaacCfuUfcCfauuuusgsa | | GA | | | | UA |
| SRS- | 1357 | 859 | usAfsgagu(dAB)uaacCfuUfcCfau | 850 | UAGAGUUAACCUUCCAUUUU | 881 | asasaaugGfaAfgGfuuaaacucua | 870 | AAAAUGGAAGGUUAAACUC |
| 002028 | | | uuusgsa | | GA | | | | UA |
| SRS- | 1357 | 860 | usAfsgag(T-NAc) | 851 | UAGAGAUAACCUUCCAUUUU | 876 | asasaaugGfaAfgGfuuaugcucu | 871 | AAAAUGGAAGGUUAUGCUC |
| 002032 | | | AfuaacCfuUfcCfauuuusgsa | | GA | | a | | UA |
| SRS- | 1357 | 861 | usAfsgag(dAB)AfuaacCfuUfcCfa | 851 | UAGAGAUAACCUUCCAUUUU | 876 | asasaaugGfaAfgGfuuaugcucu | 871 | AAAAUGGAAGGUUAUGCUC |
| 002034 | | | uuuusgsa | | GA | | a | | UA |
| SRS- | 1357 | 862 | usAfsgaguAf(T-NAc) | 852 | UAGAGUAAACCUUCCAUUUU | 877 | asasaaugGfaAfgGfuuguacucu | 872 | AAAAUGGAAGGUUGUACUC |
| 002045 | | | aacCfuUfcCfauuuusgsa | | GA | | a | | UA |
| SRS- | 1357 | 863 | usAfsgagu(T-A) | 853 | UAGAGUAUAACCUUCCAUUU | 878 | asasaaugGfaAfgGfuuauacucua | 873 | AAAAUGGAAGGUUAUACUC |
| 002047 | | | uaacCfuUfcCfauuuusgsa | | UGA | | | | UA |
| SRS- | 1357 | 864 | usAfsgaguAf(dAB)aacCfuUfcCfa | 852 | UAGAGUAAACCUUCCAUUUU | 877 | asasaaugGfaAfgGfuuguacucu | 872 | AAAAUGGAAGGUUGUACUC |
| 002049 | | | uuuusgsa | | GA | | a | | UA |
| SRS- | 1357 | 865 | usAfsgaguAfuaacCfuUfcCfauuucs | 854 | UAGAGUAUAACCUUCCAUUU | 879 | gsasaaugGfaAfgGfuuauacucu | 874 | GAAAUGGAAGGUUAUACUC |
| 002050 | | | gsa | | CGA | | a | | UA |
| SRS- | 1357 | 866 | usAfsgaguAfuaacCfuUfcCfauuccs | 855 | UAGAGUAUAACCUUCCAUUC | 880 | gsgsaaugGfaAfgGfuuauacucu | 875 | GGAAUGGAAGGUUAUACUC |
| 002051 | | | gsa | | CGA | | a | | UA |
| SRS- | 1357 | 867 | usAfsgag(T-T) | 856 | UAGAGTAUAACCUUCCAUUU | 878 | asasaaugGfaAfgGfuuauacucua | 873 | AAAAUGGAAGGUUAUACUC |
| 002052 | | | AfuaacCfuUfcCfauuuusgsa | | UGA | | | | UA |
| SRS- | 1357 | 868 | usAfsgaguAf(T-T) | 857 | UAGAGUATAACCUUCCAUUU | 878 | asasaaugGfaAfgGfuuauacucua | 873 | AAAAUGGAAGGUUAUACUC |
| 002053 | | | aacCfuUfcCfauuuusgsa | | UGA | | | | UA |

Note:
the target position is relative to human transcript NM_014495.4; the corresponding sequence of a certain SEQ ID NO. is located on its right column of the same row.
“A” refers to adenosine-3′-phosphate; “a” refers to 2′-O-methyladenosine-3′-phosphate; “Af” refers to 2′-fluoroadenosine-3′-phosphate; “dA” refers to 2′-deoxyadenosine-3-phosphate; “al” refers to 2-Amino-2′-O-methyladenosine-3′-phosphate; “C” refers to cytidine-3′-phosphate; “c” refers to 2′-O-methylcytidine-3′-phosphate; “Cf” refers to 2′-fluorocytidine-3′-phosphate; “dC” refers to 2′-deoxycytidine-3′-phosphate; “G” refers to guanosine-3′-phosphate; “g” refers to 2′-O-methylguanosine-3′-phosphate; “Gf” refers to 2′-fluoroguanosine-3′-phosphate; “dG” refers to 2′-deoxyguanosine-3′-phosphate; “U” refers to uridine-3′-phosphate; “u” refers to 2′-O-methyluridine-3′-phosphate; “Uf” refers to 2′-fluorouridine-3′-phosphate; “u3” refers to 2′-O-methyl-2-thiouridine-3′-phosphate; “U3f” refers to 2′-fluoro-2-thiouridine-3′-phosphate; “T” refers to 5-methyluridine-3′-phosphate; “t” refers to 2′-O-methyl-5-methyluridine-3′-phosphate; “Tf” refers to 2′-fluoro-5-methyluridine-3′-phosphate; “dT” refers to 2′-deoxythymidine-3′-phosphate; “s” refers to 3′-phosphorothioate; “(T-T)” refers to acyclic L-threoninol nucleic acid-thymine-3′-phosphate; “(T-A)” refers to acyclic L-threoninol nucleic acid-adenine-3′-phosphate; “(T-NAc)” refers to acyclic N-acetyl L-threoninol abasic nucleic acid-3′phosphate; “(dAB)” refers to 1′,2′-Dideoxyribose-3′phosphate; Each modified sense sequence is coupled to a targeting moiety (e.g., GalNAc or galactose) at its 3′ end via a linker (e.g., Formula V′, V““, V““““, or V““““““).

TABLE 4
siRNAs Selected for In Vivo NHP Screening

| | | | | | | SEQ | Passenger/Sense | | |
|---|---|---|---|---|---|---|---|---|---|
| Duplex | Target | SEQ ID | Guide/Antisense Structure Code | SEQ ID | Guide/Antisense Base | ID | Structure | SEQ ID | Passenger/Sense Base |
| ID | Position | NO. | (5′-3′) | NO. | Sequence (5′-3′) | NO. | Code (5′-3′) | NO. | Sequence (5′-3′) |
| SRS- | 1101 | 313 | usUfsaguuGfguuuCfgUfgAfuuucc | 113 | UUAGUUGGUUUCGUGAU | 713 | gsgsaaauCfaCfgAfaaccaacu | 513 | GGAAAUCACGAAACCAAC |
| 000656 | | | scsa | | UUCCCA | | aa | | UAA |
| SRS- | 1358 | 346 | usUfsagagUfauaaCfcUfuCfcauuu | 146 | UUAGAGUAUAACCUUCC | 746 | asasauggAfaGfgUfuauacucu | 546 | AAAUGGAAGGUUAUACUC |
| 000576 | | | susg | | AUUUUG | | aa | | UAA |
| SRS- | 1384 | 353 | usAfsuggaUfcaacAfuUfuUfgguug | 153 | UAUGGAUCAACAUUUUG | 753 | csasaccaAfaAfuGfuugaucca | 553 | CAACCAAAAUGUUGAUCC |
| 000577 | | | sasu | | GUUGAU | | ua | | AUA |
| SRS- | 1496 | 358 | usUfsaaggAfuuuaAfuAfcCfagauu | 158 | UUAAGGAUUUAAUACCA | 758 | asasucugGfuAfuUfaaauccuu | 558 | AAUCUGGUAUUAAAUCCU |
| 000578 | | | sasu | | GAUUAU | | aa | | UAA |
| SRS- | 1012 | 308 | usAfsuuagAfuugcUfuCfaCfuaugg | 108 | UAUUAGAUUGCUUCACU | 708 | cscsauagUfgAfaGfcaaucuaa | 508 | CCAUAGUGAAGCAAUCUA |
| 000655 | | | sasg | | AUGGAG | | ua | | AUA |
| SRS- | 1103 | 314 | usUfsauagUfugguUfuCfgUfgauuu | 114 | UUAUAGUUGGUUUCGUG | 714 | asasaucaCfgAfaAfccaacuau | 514 | AAAUCACGAAACCAACUA |
| 000657 | | | scsc | | AUUUCC | | aa | | UAA |
| SRS- | 1357 | 345 | usAfsgaguAfuaacCfuUfcCfauuuu | 145 | UAGAGUAUAACCUUCCA | 745 | asasaaugGfaAfgGfuuauacuc | 545 | AAAAUGGAAGGUUAUACU |
| 000658 | | | sgsa | | UUUUGA | | ua | | CUA |

Note:
the target position is relative to human transcript NM_014495.4; the corresponding sequence of a certain SEQ ID NO. is located on its right column of the same row.
“A” refers to adenosine-3′-phosphate; “a” refers to 2′-O-methyladenosine-3′-phosphate; “Af” refers to 2′-fluoroadenosine-3′-phosphate; “dA” refers to 2′-deoxyadenosine-3-phosphate; “C” refers to cytidine-3′-phosphate; “c” refers to 2′-O-methylcytidine-3′-phosphate; “Cf” refers to 2′-fluorocytidine-3′-phosphate; “dC” refers to 2′-deoxycytidine-3′-phosphate; “G” refers to guanosine-3′-phosphate; “g” refers to 2′-O-methylguanosine-3′-phosphate; “Gf” refers to 2′-fluoroguanosine-3′-phosphate; “dG” refers to 2′-deoxyguanosine-3′-phosphate; “U” refers to uridine-3′-phosphate; “u” refers to 2′-O-methyluridine-3′-phosphate; “Uf” refers to 2′-fluorouridine-3′-phosphate; “dU” refers to 2′-deoxyuridine-3′-phosphate; “T” refers to 5-methyluridine-3′-phosphate; “t” refers to 2′-O-methyl-5-methyluridine-3′-phosphate; “Tf” refers to 2′-fluoro-5-methyluridine-3′-phosphate; “dT” refers to thymidine-3′-phosphate; “(invAb)” refers to inverted abasic deoxyribonucleotide; “s” refers to 3′-phosphorothioate; Each modified sense sequence is coupled to a targeting moeity (e.g, GalNAc or galactose) at its 3′ end via linker (e.g, Formula V′, V“, V“, V“).

TABLE 5
Results of In vitro efficacy of siRNAs targeting ANGPTL3

| | | | | | | 10 μM screen | | | 0.5 μM screen | | |
|---|---|---|---|---|---|---|---|---|---|---|---|
| | | | | | | 10 uM | | | 0.5 uM | | |
| Sequence Info | | | | | | % | | | % | | |
| | SEQ | | SED | | | Residual | | | Residual | | |
| Duplex | ID | | ID | | Transcript | Target | SD quad- | 10 μM | Target | SD quad- | 0.5 μM |
| ID | NO. | Sense Sequence | NO. | Antisense Sequence | Position | mRNA | ruplicates | Rank | mRNA | ruplicates | Rank |
| SRS- | 601 | asasaaauGfuUfcAfca | 201 | usGfscuuaAfuuguGf | 44 | 64.5 | 5.6 | 51 | 70.7 | 6.8 | 57 |
| 000362 | | auuaagca | | aAfcAfuuuuusasu | | | | | | | |
| SRS- | 602 | asasuguuCfaCfaAfuu | 202 | usGfsgagcUfuaauUfg | 47 | 50.0 | 3.3 | 34 | 50.8 | 6.9 | 29 |
| 000363 | | aagcucca | | UfgAfacauususu | | | | | | | |
| SRS- | 603 | usgsuucaCfaAfuUfaa | 203 | usAfsaggaGfcuuaAfu | 49 | 28.7 | 3.8 | 4 | 33.2 | 2.6 | 4 |
| 000364 | | gcuccuua | | UfgUfgaacasusu | | | | | | | |
| SRS- | 604 | uscsacaaUfuAfaGfcu | 204 | usAfsagaaGfgagcUfu | 52 | 83.4 | 3.0 | 99 | 86.3 | 7.8 | 102 |
| 000365 | | ccuucuua | | AfaUfugugasasc | | | | | | | |
| SRS- | 605 | asasuuaaGfcUfcCfuu | 205 | usUfsaaaaAfgaagGfa | 56 | 31.1 | 1.9 | 9 | 37.5 | 4.7 | 9 |
| 000366 | | cuuuuuaa | | GfcUfuaauusgsu | | | | | | | |
| SRS- | 606 | asusuaagCfuCfcUfuc | 206 | usAfsuaaaAfagaaGfg | 57 | 29.7 | 3.2 | 5 | 29.3 | 1.5 | 1 |
| 000367 | | uuuuuaua | | AfgCfuuaaususg | | | | | | | |
| SRS- | 607 | ususuuauUfgUfuCfcu | 207 | usUfsaacuAfgaggAfa | 71 | 30.3 | 1.8 | 7 | 40.1 | 1.1 | 16 |
| 000368 | | cuaguuaa | | CfaAfuaaaasasg | | | | | | | |
| SRS- | 608 | ususuauuGfuUfcCfuc | 208 | usAfsuaacUfagagGfa | 72 | 35.2 | 3.1 | 13 | 38.7 | 3.3 | 12 |
| 000369 | | uaguuaua | | AfcAfauaaasasa | | | | | | | |
| SRS- | 609 | ususguucCfuCfuAfgu | 209 | usGfsgaaaUfaacuAfg | 76 | 70.5 | 8.0 | 66 | 72.7 | 5.6 | 63 |
| 000370 | | uauuucca | | AfgGfaacaasusa | | | | | | | |
| SRS- | 610 | asuscaagAfuUfuGfcu | 210 | usCfsuaacAfuagcAfa | 149 | 68.8 | 7.2 | 60 | 71.5 | 5.3 | 59 |
| 000371 | | auguuaga | | AfuCfuugaususu | | | | | | | |
| SRS- | 611 | csasagauUfuGfcUfau | 211 | usGfsucuaAfcauaGfc | 151 | 43.6 | 2.5 | 26 | 60.3 | 5.4 | 41 |
| 000372 | | guuagaca | | AfaAfucuugsasu | | | | | | | |
| SRS- | 612 | asasgauuUfgCfuAfug | 212 | usCfsgucuAfacauAfg | 152 | 66.2 | 3.9 | 54 | 67.7 | 2.1 | 52 |
| 000373 | | uuagacga | | CfaAfaucuusgsa | | | | | | | |
| SRS- | 613 | asgsauuuGfcUfaUfgu | 213 | usUfscgucUfaacaUfa | 153 | 88.2 | 8.5 | 112 | 76.3 | 10.2 | 71 |
| 000374 | | uagacgaa | | GfcAfaaucususg | | | | | | | |
| SRS- | 614 | gsasuuugCfuAfuGfu | 214 | usAfsucguCfuaacAfu | 154 | 37.2 | 0.9 | 16 | 39.2 | 3.1 | 13 |
| 000375 | | uagacgaua | | AfgCfaaaucsusu | | | | | | | |
| SRS- | 615 | asusuugcUfaUfgUfua | 215 | usCfsaucgUfcuaaCfa | 155 | 67.5 | 5.5 | 57 | 57.1 | 1.3 | 37 |
| 000376 | | gacgauga | | UfaGfcaaauscsu | | | | | | | |
| SRS- | 616 | ususugcuAfuGfuUfa | 216 | usAfscaucGfucuaAfc | 156 | 75.6 | 6.7 | 78 | 71.0 | 3.5 | 58 |
| 000377 | | gacgaugua | | AfuAfgcaaasusc | | | | | | | |
| SRS- | 617 | ususgcuaUfgUfuAfga | 217 | usUfsacauCfgucuAfa | 157 | 72.4 | 3.2 | 73 | 70.4 | 3.2 | 56 |
| 000378 | | cgauguaa | | CfaUfagcaasasu | | | | | | | |
| SRS- | 618 | gscsuaugUfuAfgAfcg | 218 | usUfsuuacAfucguCfu | 159 | 34.7 | 2.8 | 12 | 39.2 | 3.9 | 14 |
| 000379 | | auguaaaa | | AfaCfauagcsasa | | | | | | | |
| SRS- | 619 | csusauguUfaGfaCfga | 219 | usUfsuuuaCfaucgUfc | 160 | 62.8 | 10.6 | 45 | 66.1 | 4.3 | 50 |
| 000380 | | uguaaaaa | | UfaAfcauagscsa | | | | | | | |
| SRS- | 620 | usasuguuAfgAfcGfau | 220 | usUfsuuuuAfcaucGf | 161 | 33.9 | 5.5 | 11 | 38.2 | 3.0 | 11 |
| 000381 | | guaaaaaa | | uCfuAfacauasgsc | | | | | | | |
| SRS- | 621 | usgsuuagAfcGfaUfgu | 221 | usAfsauuuUfuacaUfc | 163 | 41.6 | 5.1 | 22 | 49.2 | 2.5 | 27 |
| 000382 | | aaaaauua | | GfuCfuaacasusa | | | | | | | |
| SRS- | 622 | ususagacGfaUfgUfaa | 222 | usAfsaaauUfuuuaCfa | 165 | 23.5 | 0.3 | 2 | 36.8 | 5.4 | 7 |
| 000383 | | aaauuuua | | UfcGfucuaascsa | | | | | | | |
| SRS- | 623 | asasauuuUfaGfcCfaa | 223 | usGfsaggcCfauugGfc | 178 | 114.2 | 9.2 | 164 | 114.0 | 6.7 | 191 |
| 000384 | | uggccuca | | UfaAfaauuususu | | | | | | | |
| SRS- | 624 | asasuuuuAfgCfcAfau | 224 | usGfsgaggCfcauuGfg | 179 | 102.4 | 14.5 | 144 | 104.7 | 12.3 | 175 |
| 000385 | | ggccucca | | CfuAfaaauususu | | | | | | | |
| SRS- | 625 | ususagccAfaUfgGfcc | 225 | usUfsgaagGfaggcCfa | 183 | 84.3 | 9.8 | 101 | 93.6 | 11.9 | 133 |
| 000386 | | uccuucaa | | UfuGfgcuaasasa | | | | | | | |
| SRS- | 626 | cscsaaugGfcCfuCfcu | 226 | usCfsaacuGfaaggAfg | 187 | 97.6 | 10.6 | 133 | 112.7 | 14.8 | 190 |
| 000387 | | ucaguuga | | GfcCfauuggscsu | | | | | | | |
| SRS- | 627 | csasauggCfcUfcCfuu | 227 | usCfscaacUfgaagGfa | 188 | 104.7 | 11.1 | 149 | 106.2 | 12.1 | 178 |
| 000388 | | caguugga | | GfgCfcauugsgsc | | | | | | | |
| SRS- | 628 | asasuggcCfuCfcUfuc | 228 | usCfsccaaCfugaaGfg | 189 | 103.3 | 4.8 | 145 | 108.1 | 10.4 | 182 |
| 000389 | | aguuggga | | AfgGfccauusgsg | | | | | | | |
| SRS- | 629 | csusccuuCfaGfuUfgg | 229 | usCfscaugUfcccaAfc | 195 | 109.8 | 15.9 | 155 | 122.8 | 22.2 | 194 |
| 000390 | | gacaugga | | UfgAfaggagsgsc | | | | | | | |
| SRS- | 630 | csusucagUfuGfgGfac | 230 | usAfsgaccAfugucCfc | 198 | 89.0 | 9.5 | 117 | 92.9 | 11.3 | 127 |
| 000391 | | auggucua | | AfaCfugaagsgsa | | | | | | | |
| SRS- | 631 | asgsuuggGfaCfaUfgg | 231 | usUfsuuaaGfaccaUfg | 202 | 77.9 | 5.0 | 82 | 97.2 | 7.2 | 146 |
| 000392 | | ucuuaaaa | | UfcCfcaacusgsa | | | | | | | |
| SRS- | 632 | ususgggaCfaUfgGfuc | 232 | usUfscuuuAfagacCfa | 204 | 64.7 | 5.1 | 52 | 91.1 | 4.5 | 121 |
| 000393 | | uuaaagaa | | UfgUfcccaascsu | | | | | | | |
| SRS- | 633 | gsgsgacaUfgGfuCfuu | 233 | usAfsgucuUfuaagAfc | 206 | 82.9 | 7.3 | 97 | 99.3 | 7.3 | 153 |
| 000394 | | aaagacua | | CfaUfgucccsasa | | | | | | | |
| SRS- | 634 | gsgsacauGfgUfcUfua | 234 | usAfsagucUfuuaaGfa | 207 | 58.0 | 2.0 | 38 | 84.4 | 7.6 | 98 |
| 000395 | | aagacuua | | CfcAfugucescsa | | | | | | | |
| SRS- | 635 | gsascaugGfuCfuUfaa | 235 | usAfsaaguCfuuuaAfg | 208 | 70.3 | 5.0 | 65 | 84.6 | 3.0 | 99 |
| 000396 | | agacuuua | | AfcCfaugucsesc | | | | | | | |
| SRS- | 636 | ascsauggUfcUfuAfaa | 236 | usCfsaaagUfcuuuAfa | 209 | 79.2 | 5.2 | 87 | 98.6 | 4.6 | 149 |
| 000397 | | gacuuuga | | GfaCfcauguscsc | | | | | | | |
| SRS- | 637 | csasugguCfuUfaAfag | 237 | usAfscaaaGfucuuUfa | 210 | 78.5 | 3.3 | 84 | 86.9 | 8.4 | 103 |
| 000398 | | acuuugua | | AfgAfccaugsusc | | | | | | | |
| SRS- | 638 | ususaaagAfcUfuUfgu | 238 | usCfsuuauGfgacaAfa | 217 | 88.3 | 8.2 | 113 | 94.4 | 3.1 | 138 |
| 000399 | | ccauaaga | | GfuCfuuuaasgsa | | | | | | | |
| SRS- | 639 | ascsgaagGfgCfcAfaa | 239 | usUfscauuAfauuuGf | 237 | 80.7 | 6.6 | 92 | 94.5 | 7.5 | 139 |
| 000400 | | uuaaugaa | | gCfcCfuucguscsu | | | | | | | |
| SRS- | 640 | ascsucaaCfaUfaUfuu | 240 | usAfscugaUfcaaaUfa | 269 | 51.0 | 15.4 | 35 | 52.8 | 14.3 | 35 |
| 000401 | | gaucagua | | UfgUfugagususu | | | | | | | |
| SRS- | 641 | ascsauauUfuGfaUfca | 241 | usAfsaaagAfcugaUfc | 274 | 30.1 | 1.8 | 6 | 35.7 | 1.5 | 6 |
| 000402 | | gucuuuua | | AfaAfuaugususg | | | | | | | |
| SRS- | 642 | gsasucagUfcUfuUfuu | 242 | usAfsgaucAfuaaaAfa | 282 | 35.4 | 5.2 | 14 | 50.7 | 1.5 | 28 |
| 000403 | | augaucua | | GfaCfugaucsasa | | | | | | | |
| SRS- | 643 | asuscaguCfuUfuUfua | 243 | usUfsagauCfauaaAfa | 283 | 20.8 | 1.5 | 1 | 31.1 | 2.0 | 2 |
| 000404 | | ugaucuaa | | AfgAfcugauscsa | | | | | | | |
| SRS- | 644 | ascsauauAfaAfcUfac | 244 | usUfsugacUfuguaGf | 354 | 41.2 | 2.2 | 20 | 45.5 | 4.2 | 21 |
| 000405 | | aagucaaa | | uUfuAfuaugusasg | | | | | | | |
| SRS- | 645 | uscsacuuGfaAfcUfca | 245 | usUfsuugaGfuugaGf | 396 | 39.8 | 3.2 | 19 | 46.4 | 4.6 | 23 |
| 000406 | | acucaaaa | | uUfcAfagugascsa | | | | | | | |
| SRS- | 646 | csasaaacUfuGfaAfag | 246 | usUfsaggaGfgcuuUfc | 412 | 58.2 | 6.5 | 41 | 59.4 | 7.1 | 40 |
| 000407 | | ccuccuaa | | AfaGfuuuugsasg | | | | | | | |
| SRS- | 647 | asasauauUfuAfgAfag | 247 | usAfsguugCfucuuCf | 462 | 78.5 | 7.2 | 86 | 80.2 | 14.1 | 89 |
| 000408 | | agcaacua | | uAfaAfuauuuscsa | | | | | | | |
| SRS- | 648 | asgsaagaGfcAfaCfua | 248 | usAfsguuaGfuuagUf | 470 | 115.5 | 5.4 | 170 | 102.6 | 8.9 | 167 |
| 000409 | | acuaacua | | uGfcUfcuucusasa | | | | | | | |
| SRS- | 649 | asasgagcAfaCfuAfac | 249 | usUfsaaguUfaguuAf | 472 | 73.4 | 6.0 | 74 | 79.9 | 9.0 | 88 |
| 000410 | | uaacuuaa | | gUfuGfcucuuscsu | | | | | | | |
| SRS- | 650 | asgsagcaAfcUfaAfcu | 250 | usUfsuaagUfuaguUfa | 473 | 43.4 | 3.3 | 25 | 46.0 | 2.3 | 22 |
| 000411 | | aacuuaaa | | GfuUfgcucususc | | | | | | | |
| SRS- | 651 | gsasgcaaCfuAfaCfua | 251 | usAfsuuaaGfuuagUf | 474 | 52.8 | 3.9 | 37 | 60.5 | 10.9 | 42 |
| 000412 | | acuuaaua | | uAfgUfugcucsusu | | | | | | | |
| SRS- | 652 | usasacuuAfaUfuCfaa | 252 | usGfsuugaUfuuugAf | 485 | 58.1 | 6.6 | 39 | 67.2 | 6.1 | 51 |
| 000413 | | aaucaaca | | aUfuAfaguuasgsu | | | | | | | |
| SRS- | 653 | ascsccagAfaGfuAfac | 253 | usAfsagugAfaguuAf | 520 | 42.5 | 0.6 | 24 | 58.4 | 4.1 | 38 |
| 000414 | | uucacuua | | cUfuCfugggusgsu | | | | | | | |
| SRS- | 654 | cscscagaAfgUfaAfcu | 254 | usUfsaaguGfaaguUfa | 521 | 47.3 | 4.8 | 33 | 53.4 | 2.1 | 36 |
| 000415 | | ucacuuaa | | CfuUfcugggsusg | | | | | | | |
| SRS- | 655 | asasaaacAfaGfaUfaa | 255 | usGfsaugcUfauuaUfc | 553 | 63.4 | 1.4 | 47 | 65.8 | 3.1 | 48 |
| 000416 | | uagcauca | | UfuGfuuuuuscsu | | | | | | | |
| SRS- | 656 | asasacaaGfaUfaAfua | 256 | usUfsugauGfcuauUfa | 555 | 25.8 | 1.3 | 3 | 31.4 | 1.1 | 3 |
| 000417 | | gcaucaaa | | UfcUfuguuususu | | | | | | | |
| SRS- | 657 | asgsauaaUfaGfcAfuc | 257 | usGfsgucuUfugauGf | 560 | 73.9 | 3.9 | 75 | 74.3 | 3.2 | 66 |
| 000418 | | aaagacca | | cUfaUfuaucususg | | | | | | | |
| SRS- | 658 | asusaauaGfcAfuCfaa | 258 | usAfsagguCfuuugAf | 562 | 93.1 | 3.1 | 126 | 88.1 | 6.6 | 109 |
| 000419 | | agaccuua | | uGfcUfauuauscsu | | | | | | | |
| SRS- | 659 | csasauuaAfaCfcAfac | 259 | usCfsuaugCfuguuGf | 609 | 99.8 | 10.0 | 139 | 100.7 | 11.7 | 161 |
| 000420 | | agcauaga | | gUfuUfaauugsusu | | | | | | | |
| SRS- | 660 | asasccaaCfaGfcAfua | 260 | usAfsuuugAfcuauGf | 615 | 36.9 | 3.2 | 15 | 48.7 | 2.3 | 26 |
| 000421 | | gucaaaua | | cUfgUfugguususa | | | | | | | |
| SRS- | 661 | asgsccaaGfaGfcAfcc | 261 | usAfsguucUfugguGf | 703 | 67.3 | 4.7 | 56 | 63.6 | 2.5 | 45 |
| 000422 | | aagaacua | | cUfcUfuggcususg | | | | | | | |
| SRS- | 662 | uscsagacCfcAfgCfaa | 262 | usUfsugagAfguugCf | 832 | 92.0 | 6.3 | 122 | 93.6 | 0.6 | 134 |
| 000423 | | cucucaaa | | uGfgGfucugasusg | | | | | | | |
| SRS- | 663 | csasgaccCfaGfcAfac | 263 | usCfsuugaGfaguuGfc | 833 | 82.4 | 4.1 | 95 | 97.5 | 7.7 | 148 |
| 000424 | | ucucaaga | | UfgGfgucugsasu | | | | | | | |
| SRS- | 664 | asgsacccAfgCfaAfcu | 264 | usAfscuugAfgaguUf | 834 | 93.6 | 3.2 | 127 | 101.1 | 11.8 | 163 |
| 000425 | | cucaagua | | gCfuGfggucusgsa | | | | | | | |
| SRS- | 665 | asgscaacUfcUfcAfag | 265 | usUfsgaaaAfacuuGfa | 840 | 79.3 | 5.7 | 89 | 78.2 | 7.0 | 80 |
| 000426 | | uuuuucaa | | GfaGfuugcusgsg | | | | | | | |
| SRS- | 666 | ususauauCfaGfgUfag | 266 | usCfscaugGfacuaCfc | 874 | 108.3 | 5.8 | 153 | 99.9 | 8.9 | 157 |
| 000427 | | uccaugga | | UfgAfuauaascsa | | | | | | | |
| SRS- | 667 | usasucagGfuAfgUfcc | 267 | usUfsguccAfuggaCfu | 877 | 92.1 | 4.6 | 123 | 88.9 | 3.8 | 113 |
| 000428 | | auggacaa | | AfcCfugauasusa | | | | | | | |
| SRS- | 668 | asuscaggUfaGfuCfca | 268 | usAfsugucCfauggAfc | 878 | 119.0 | 17.7 | 175 | 91.2 | 7.5 | 122 |
| 000429 | | uggacaua | | UfaCfcugausasu | | | | | | | |
| SRS- | 669 | uscsagguAfgUfcCfau | 269 | usAfsauguCfcaugGfa | 879 | 125.5 | 8.1 | 184 | 98.7 | 9.2 | 150 |
| 000430 | | ggacauua | | CfuAfccugasusa | | | | | | | |
| SRS- | 670 | asgsuccaUfgGfaCfau | 270 | usUfsgaauUfaaugUfc | 885 | 136.9 | 9.4 | 190 | 99.0 | 4.9 | 151 |
| 000431 | | uaauucaa | | CfaUfggacusasc | | | | | | | |
| SRS- | 671 | gsusccauGfgAfcAfuu | 271 | usUfsugaaUfuaauGfu | 886 | 72.2 | 7.3 | 71 | 61.9 | 4.4 | 43 |
| 000432 | | aauucaaa | | CfcAfuggacsusa | | | | | | | |
| SRS- | 672 | uscscaugGfaCfaUfua | 272 | usGfsuugaAfuuaaUf | 887 | 70.5 | 5.9 | 67 | 63.8 | 6.7 | 46 |
| 000238 | | auucaaca | | gUfcCfauggascsu | | | | | | | |
| SRS- | 673 | gsgsacauUfaAfuUfca | 273 | usUfscgauGfuugaAf | 892 | 85.2 | 8.2 | 105 | 83.4 | 4.6 | 96 |
| 000433 | | acaucgaa | | uUfaAfuguccsasu | | | | | | | |
| SRS- | 674 | ascsauuaAfuUfcAfac | 274 | usAfsuucgAfuguuGf | 894 | 81.5 | 1.3 | 93 | 76.6 | 6.2 | 72 |
| 000434 | | aucgaaua | | aAfuUfaauguscsc | | | | | | | |
| SRS- | 675 | csasuuaaUfuCfaAfca | 275 | usUfsauucGfauguUf | 895 | 71.4 | 7.8 | 70 | 77.1 | 4.6 | 74 |
| 000435 | | ucgaauaa | | gAfaUfuaaugsusc | | | | | | | |
| SRS- | 676 | ususaauuCfaAfcAfuc | 276 | usUfscuauUfcgauGfu | 897 | 67.0 | 10.7 | 55 | 75.4 | 6.1 | 70 |
| 000436 | | gaauagaa | | UfgAfauuaasusg | | | | | | | |
| SRS- | 677 | usasauucAfaCfaUfcg | 277 | usAfsucuaUfucgaUfg | 898 | 58.6 | 7.0 | 42 | 79.8 | 5.6 | 87 |
| 000437 | | aauagaua | | UfuGfaauuasasu | | | | | | | |
| SRS- | 678 | asasuucaAfcAfuCfga | 278 | usCfsaucuAfuucgAfu | 899 | 82.4 | 8.6 | 96 | 91.0 | 7.6 | 119 |
| 000438 | | auagauga | | GfuUfgaauusasa | | | | | | | |
| SRS- | 679 | uscsaacaUfcGfaAfua | 279 | usAfsuccaUfcuauUfc | 902 | 75.5 | 12.0 | 77 | 85.9 | 4.9 | 101 |
| 000439 | | gauggaua | | GfaUfguugasasu | | | | | | | |
| SRS- | 680 | csasacauCfgAfaUfag | 280 | usGfsauceAfucuaUfu | 903 | 72.3 | 12.8 | 72 | 73.9 | 6.7 | 64 |
| 000440 | | auggauca | | CfgAfuguugsasa | | | | | | | |
| SRS- | 681 | asascaucGfaAfuAfga | 281 | usUfsgaucCfaucuAfu | 904 | 70.6 | 7.3 | 69 | 79.4 | 4.4 | 86 |
| 000441 | | uggaucaa | | UfcGfauguusgsa | | | | | | | |
| SRS- | 682 | ascsaucgAfaUfaGfau | 282 | usGfsugauCfcaucUfa | 905 | 86.6 | 6.1 | 109 | 88.9 | 2.2 | 112 |
| 000442 | | ggaucaca | | UfuCfgaugususg | | | | | | | |
| SRS- | 683 | uscsgaauAfgAfuGfga | 283 | usUfsuuguGfauccAf | 908 | 89.5 | 5.6 | 119 | 88.5 | 4.6 | 110 |
| 000443 | | ucacaaaa | | uCfuAfuucgasusg | | | | | | | |
| SRS- | 684 | asusagauGfgAfuCfac | 284 | usAfsaguuUfugugAf | 912 | 64.2 | 5.8 | 50 | 71.9 | 6.3 | 60 |
| 000444 | | aaaacuua | | uCfcAfucuaususc | | | | | | | |
| SRS- | 685 | gsasuggaUfcAfcAfaa | 285 | usUfsugaaGfuuuuGf | 915 | 118.4 | 10.5 | 174 | 107.0 | 11.7 | 180 |
| 000445 | | acuucaaa | | uGfaUfccaucsusa | | | | | | | |
| SRS- | 686 | ascsaaaaCfuUfcAfau | 286 | usAfscguuUfcauuGfa | 923 | 97.7 | 11.7 | 134 | 90.3 | 8.2 | 115 |
| 000446 | | gaaacgua | | AfgUfuuugusgsa | | | | | | | |
| SRS- | 687 | asasaacuUfcAfaUfga | 287 | usCfscacgUfuucaUfu | 925 | 117.8 | 10.0 | 172 | 111.8 | 7.1 | 188 |
| 000447 | | aacgugga | | GfaAfguuuusgsu | | | | | | | |
| SRS- | 688 | asasacuuCfaAfuGfaa | 288 | usCfsccacGfuuucAfu | 926 | 113.6 | 15.2 | 162 | 107.5 | 11.5 | 181 |
| 000448 | | acguggga | | UfgAfaguuususg | | | | | | | |
| SRS- | 689 | csusucaaUfgAfaAfcg | 289 | usUfscuccCfacguUfu | 929 | 123.4 | 12.5 | 181 | 116.9 | 18.8 | 192 |
| 000449 | | ugggagaa | | CfaUfugaagsusu | | | | | | | |
| SRS- | 690 | ususcaauGfaAfaCfgu | 290 | usUfsucucCfcacgUfu | 930 | 124.6 | 13.4 | 183 | 111.2 | 9.7 | 187 |
| 000450 | | gggagaaa | | UfcAfuugaasgsu | | | | | | | |
| SRS- | 691 | uscsaaugAfaAfcGfug | 291 | usGfsuucuCfccacGfu | 931 | 97.2 | 9.9 | 132 | 94.3 | 11.5 | 137 |
| 000451 | | ggagaaca | | UfuCfauugasasg | | | | | | | |
| SRS- | 692 | asasugaaAfcGfuGfgg | 292 | usUfsaguuCfucccAfc | 933 | 115.5 | 13.9 | 169 | 106.2 | 9.0 | 177 |
| 000452 | | agaacuaa | | GfuUfucauusgsa | | | | | | | |
| SRS- | 693 | asusgaaaCfgUfgGfga | 293 | usGfsuaguUfcuccCfa | 934 | 105.1 | 6.6 | 150 | 109.6 | 8.1 | 185 |
| 000453 | | gaacuaca | | CfgUfuucaususg | | | | | | | |
| SRS- | 694 | gsasaacgUfgGfgAfga | 294 | usUfsuguaGfuucuCfc | 936 | 112.0 | 9.4 | 158 | 111.2 | 9.2 | 186 |
| 000454 | | acuacaaa | | CfaCfguuucsasu | | | | | | | |
| SRS- | 695 | asasacguGfgGfaGfaa | 295 | usUfsuuguAfguucUf | 937 | 107.7 | 5.5 | 152 | 87.5 | 9.7 | 105 |
| 000455 | | cuacaaaa | | cCfcAfcguuuscsa | | | | | | | |
| SRS- | 696 | usgsggagAfaCfuAfca | 296 | usCfscauaUfuuguAfg | 942 | 68.0 | 4.8 | 58 | 79.2 | 12.1 | 85 |
| 000456 | | aauaugga | | UfuCfucccascsg | | | | | | | |
| SRS- | 697 | usgsggagGfcUfuGfau | 297 | usAfsuucuCfcaucAfa | 965 | 79.2 | 1.9 | 88 | 87.9 | 4.8 | 108 |
| 000457 | | ggagaaua | | GfcCfucccasasa | | | | | | | |
| SRS- | 698 | gsgsgaggCfuUfgAfu | 298 | usAfsauucUfccauCfa | 966 | 43.8 | 1.7 | 28 | 51.7 | 3.7 | 32 |
| 000458 | | ggagaauua | | AfgCfcuccesasa | | | | | | | |
| SRS- | 699 | gsgsgccuAfgAfgAfag | 299 | usAfsguauAfucuuCf | 992 | 88.6 | 2.4 | 115 | 90.5 | 9.4 | 117 |
| 000459 | | auauacua | | uCfuAfggcccsasa | | | | | | | |
| SRS- | 700 | gscscuagAfgAfaGfau | 300 | usGfsgaguAfuaucUf | 994 | 83.3 | 3.9 | 98 | 81.3 | 4.2 | 91 |
| 000460 | | auacucca | | uCfuCfuaggescsc | | | | | | | |
| SRS- | 701 | asgsagaaGfaUfaUfac | 301 | usCfsuaugGfaguaUfa | 998 | 69.3 | 4.1 | 62 | 65.0 | 5.7 | 47 |
| 000461 | | uccauaga | | UfcUfucucusasg | | | | | | | |
| SRS- | 702 | gsasgaagAfuAfuAfcu | 302 | usAfscuauGfgaguAf | 999 | 87.2 | 18.0 | 110 | 81.0 | 5.8 | 90 |
| 000462 | | ccauagua | | uAfuCfuucucsusa | | | | | | | |
| SRS- | 703 | asgsaagaUfaUfaCfuc | 303 | usCfsacuaUfggagUfa | 1000 | 82.3 | 5.7 | 94 | 77.1 | 3.2 | 75 |
| 000463 | | cauaguga | | UfaUfcuucusesu | | | | | | | |
| SRS- | 704 | gsasagauAfuAfcUfcc | 304 | usUfscacuAfuggaGfu | 1001 | 78.5 | 5.8 | 85 | 78.1 | 8.1 | 79 |
| 000464 | | auagugaa | | AfuAfucuucsusc | | | | | | | |
| SRS- | 705 | asasgauaUfaCfuCfca | 305 | usUfsucacUfauggAfg | 1002 | 110.5 | 9.5 | 156 | 118.3 | 6.0 | 193 |
| 000465 | | uagugaaa | | UfaUfaucuuscsu | | | | | | | |
| SRS- | 706 | usasuacuCfcAfuAfgu | 306 | usUfsugcuUfcacuAfu | 1006 | 113.1 | 14.3 | 161 | 104.6 | 17.2 | 174 |
| 000466 | | gaagcaaa | | GfgAfguauasusc | | | | | | | |
| SRS- | 707 | asusacucCfaUfaGfug | 307 | usAfsuugcUfucacUfa | 1007 | 44.7 | 4.2 | 31 | 44.7 | 14.3 | 20 |
| 000467 | | aagcaaua | | UfgGfaguausasu | | | | | | | |
| SRS- | 708 | cscsauagUfgAfaGfca | 308 | usAfsuuagAfuugcUf | 1012 | 41.3 | 2.0 | 21 | 63.0 | 35.1 | 44 |
| 000468 | | aucuaaua | | uCfaCfuauggsasg | | | | | | | |
| SRS- | 709 | asusagugAfaGfcAfau | 309 | usUfsaauuAfgauuGfc | 1014 | 33.9 | 3.7 | 10 | 37.6 | 5.6 | 10 |
| 000469 | | cuaauuaa | | UfuCfacuausgsg | | | | | | | |
| SRS- | 710 | ususuuacUfuGfgGfaa | 310 | usUfscgugAfuuucCfc | 1092 | 76.1 | 1.4 | 79 | 70.0 | 9.7 | 55 |
| 000470 | | aucacgaa | | AfaGfuaaaasasg | | | | | | | |
| SRS- | 711 | ususgggaAfaUfcAfcg | 311 | usUfsugguUfucguGf | 1098 | 38.9 | 1.9 | 18 | 43.6 | 5.5 | 19 |
| 000471 | | aaaccaaa | | aUfuUfcccaasgsu | | | | | | | |
| SRS- | 712 | gsgsgaaaUfcAfcGfaa | 312 | usAfsguugGfuuucGf | 1100 | 101.5 | 9.6 | 142 | 93.6 | 10.0 | 135 |
| 000472 | | accaacua | | uGfaUfuucccsasa | | | | | | | |
| SRS- | 713 | gsgsaaauCfaCfgAfaa | 313 | usUfsaguuGfguuuCf | 1101 | 44.4 | 1.4 | 30 | 43.5 | 6.4 | 18 |
| 000473 | | ccaacuaa | | gUfgAfuuucescsa | | | | | | | |
| SRS- | 714 | asasaucaCfgAfaAfcc | 314 | usUfsauagUfugguUf | 1103 | 43.6 | 3.8 | 27 | 39.6 | 1.9 | 15 |
| 000474 | | aacuauaa | | uCfgUfgauuuscsc | | | | | | | |
| SRS- | 715 | asasucacGfaAfaCfca | 315 | usGfsuauaGfuuggUf | 1104 | 84.5 | 7.1 | 102 | 75.1 | 14.0 | 69 |
| 000475 | | acuauaca | | uUfcGfugauususc | | | | | | | |
| SRS- | 716 | asuscacgAfaAfcCfaa | 316 | usCfsguauAfguugGf | 1105 | 138.9 | 15.1 | 192 | 112.4 | 11.9 | 189 |
| 000476 | | cuauacga | | uUfuCfgugaususu | | | | | | | |
| SRS- | 717 | uscsacgaAfaCfcAfac | 317 | usGfscguaUfaguuGf | 1106 | 136.8 | 12.1 | 189 | 103.0 | 6.5 | 170 |
| 000477 | | uauacgca | | gUfuUfcgugasusu | | | | | | | |
| SRS- | 718 | csasegaaAfcCfaAfcu | 318 | usAfsgcguAfuaguUf | 1107 | 121.9 | 8.2 | 179 | 95.5 | 7.8 | 144 |
| 000478 | | auacgcua | | gGfuUfucgugsasu | | | | | | | |
| SRS- | 719 | gsasaaccAfaCfuAfua | 319 | usUfsguagCfguauAf | 1110 | 134.1 | 17.1 | 188 | 91.0 | 11.5 | 120 |
| 000479 | | cgcuacaa | | gUfuGfguuucsgsu | | | | | | | |
| SRS- | 720 | usgscgauUfaCfuGfgc | 320 | usGfsgacaUfugccAfg | 1136 | 128.9 | 12.7 | 185 | 93.1 | 3.4 | 129 |
| 000480 | | aaugucca | | UfaAfucgcasasc | | | | | | | |
| SRS- | 721 | gscsgauuAfcUfgGfca | 321 | usGfsggacAfuugcCfa | 1137 | 139.5 | 14.8 | 194 | 96.5 | 6.5 | 145 |
| 000481 | | auguccca | | GfuAfaucgcsasa | | | | | | | |
| SRS- | 722 | csgsauuaCfuGfgCfaa | 322 | usGfsgggaCfauugCfc | 1138 | 139.5 | 9.1 | 193 | 94.8 | 20.5 | 140 |
| 000482 | | ugucccca | | AfgUfaaucgscsa | | | | | | | |
| SRS- | 723 | gsasuuacUfgGfcAfau | 323 | usUfsggggAfcauuGf | 1139 | 120.0 | 15.5 | 177 | 90.2 | 10.2 | 114 |
| 000483 | | guccccaa | | cCfaGfuaaucsgsc | | | | | | | |
| SRS- | 724 | ususacugGfcAfaUfgu | 324 | usAfsuuggGfgacaUf | 1141 | 130.9 | 2.9 | 187 | 100.2 | 17.4 | 159 |
| 000484 | | ccccaaua | | uGfcCfaguaasusc | | | | | | | |
| SRS- | 725 | gscsaaugUfcCfcCfaa | 325 | usGfsauugCfauugGf | 1147 | 111.0 | 9.1 | 157 | 109.0 | 7.6 | 184 |
| 000485 | | ugcaauca | | gGfaCfauugcscsa | | | | | | | |
| SRS- | 726 | csasauguCfcCfcAfau | 326 | usGfsgauuGfcauuGf | 1148 | 112.1 | 8.5 | 159 | 105.7 | 5.7 | 176 |
| 000486 | | gcaaucca | | gGfgAfcauugscsc | | | | | | | |
| SRS- | 727 | asusguccCfcAfaUfgc | 327 | usCfsgggaUfugcaUfu | 1150 | 146.4 | 22.6 | 195 | 99.9 | 16.4 | 156 |
| 000487 | | aaucccga | | GfgGfgacaususg | | | | | | | |
| SRS- | 728 | cscsccaaUfgCfaAfuc | 328 | usUfsuuccGfggauUf | 1154 | 104.5 | 15.0 | 148 | 78.4 | 18.5 | 81 |
| 000488 | | ccggaaaa | | gCfaUfuggggsasc | | | | | | | |
| SRS- | 729 | csasaugcAfaUfcCfcg | 329 | usUfsguuuUfccggGf | 1157 | 88.8 | 9.2 | 116 | 90.8 | 17.0 | 118 |
| 000489 | | gaaaacaa | | aUfuGfcauugsgsg | | | | | | | |
| SRS- | 730 | asasugcaAfuCfcCfgg | 330 | usUfsuguuUfuccgGf | 1158 | 138.3 | 50.1 | 191 | 77.9 | 31.1 | 78 |
| 000490 | | aaaacaaa | | gAfuUfgcauusgsg | | | | | | | |
| SRS- | 731 | asusgcaaUfcCfcGfga | 331 | usUfsuuguUfuuccGf | 1159 | 108.7 | 16.6 | 154 | 94.2 | 8.9 | 136 |
| 000491 | | aaacaaaa | | gGfaUfugcaususg | | | | | | | |
| SRS- | 732 | usgscaauCfcCfgGfaa | 332 | usCfsuuugUfuuucCf | 1160 | 112.4 | 8.5 | 160 | 82.0 | 19.7 | 92 |
| 000492 | | aacaaaga | | gGfgAfuugcasusu | | | | | | | |
| SRS- | 733 | gscsaaucCfcGfgAfaa | 333 | usUfscuuuGfuuuuCf | 1161 | 115.4 | 4.9 | 168 | 104.6 | 15.8 | 173 |
| 000493 | | acaaagaa | | cGfgGfauugcsasu | | | | | | | |
| SRS- | 734 | csasauccCfgGfaAfaa | 334 | usAfsucuuUfguuuUf | 1162 | 175.8 | 33.1 | 196 | 100.7 | 12.2 | 160 |
| 000494 | | caaagaua | | cCfgGfgauugscsa | | | | | | | |
| SRS- | 735 | gsasuuugGfuGfuUfu | 335 | usCfsaaguAfgaaaAfc | 1179 | 61.8 | 2.6 | 43 | 72.6 | 13.9 | 61 |
| 000495 | | ucuacuuga | | AfcCfaaaucsusu | | | | | | | |
| SRS- | 736 | asusuuggUfgUfuUfu | 336 | usCfscaagUfagaaAfa | 1180 | 78.2 | 3.3 | 83 | 88.5 | 3.2 | 111 |
| 000496 | | cuacuugga | | CfaCfcaaauscsu | | | | | | | |
| SRS- | 737 | ususugguGfuUfuUfc | 337 | usCfsccaaGfuagaAfa | 1181 | 88.4 | 21.1 | 114 | 99.4 | 13.1 | 154 |
| 000497 | | uacuuggga | | AfcAfccaaasusc | | | | | | | |
| SRS- | 738 | usgsuuuuCfuAfcUfu | 338 | usGfsugauCfccaaGfu | 1186 | 61.9 | 14.3 | 44 | 66.0 | 4.7 | 49 |
| 000498 | | gggaucaca | | AfgAfaaacascsc | | | | | | | |
| SRS- | 739 | ususucuaCfuUfgGfga | 339 | usUfsuuguGfauccCfa | 1189 | 86.3 | 13.1 | 108 | 93.4 | 7.4 | 131 |
| 000499 | | ucacaaaa | | AfgUfagaaasasc | | | | | | | |
| SRS- | 740 | ususcuacUfuGfgGfau | 340 | usCfsuuugUfgaucCfc | 1190 | 101.7 | 35.2 | 143 | 78.7 | 3.5 | 83 |
| 000500 | | cacaaaga | | AfaGfuagaasasa | | | | | | | |
| SRS- | 741 | csusacuuGfgGfaUfca | 341 | usUfsgcuuUfgugaUf | 1192 | 93.0 | 2.4 | 125 | 92.8 | 14.2 | 126 |
| 000501 | | caaagcaa | | cCfcAfaguagsasa | | | | | | | |
| SRS- | 742 | usascuugGfgAfuCfac | 342 | usUfsugcuUfugugAf | 1193 | 89.4 | 33.3 | 118 | 68.8 | 14.0 | 54 |
| 000502 | | aaagcaaa | | uCfcCfaaguasgsa | | | | | | | |
| SRS- | 743 | asasugguAfaAfuAfua | 343 | usGfsguuuGfuuauAf | 1287 | 96.7 | 1.7 | 130 | 101.2 | 36.7 | 164 |
| 000503 | | acaaacca | | uUfuAfccauususa | | | | | | | |
| SRS- | 744 | gsasagucUfcAfaAfau | 344 | usAfsccuuCfcauuUfu | 1349 | 107.6 | 11.1 | 151 | 108.9 | 5.3 | 183 |
| 000504 | | ggaaggua | | GfaGfacuucscsa | | | | | | | |
| SRS- | 745 | asasaaugGfaAfgGfuu | 345 | usAfsgaguAfuaacCfu | 1357 | 41.9 | 2.4 | 23 | 48.4 | 10.8 | 25 |
| 000505 | | auacucua | | UfcCfauuuusgsa | | | | | | | |
| SRS- | 746 | asasauggAfaGfgUfua | 346 | usUfsagagUfauaaCfc | 1358 | 31.1 | 6.0 | 8 | 34.5 | 14.1 | 5 |
| 000506 | | uacucuaa | | UfuCfcauuususg | | | | | | | |
| SRS- | 747 | asasuggaAfgGfuUfau | 347 | usAfsuagaGfuauaAfc | 1359 | 63.3 | 6.3 | 46 | 52.3 | 4.9 | 34 |
| 000507 | | acucuaua | | CfuUfccauususu | | | | | | | |
| SRS- | 748 | gsasagguUfaUfaCfuc | 348 | usUfsuuuaUfagagUfa | 1363 | 46.0 | 2.3 | 32 | 51.9 | 12.8 | 33 |
| 000508 | | uauaaaaa | | UfaAfccuucscsa | | | | | | | |
| SRS- | 749 | asgsguuaUfaCfuCfua | 349 | usGfsauuuUfauagAf | 1365 | 63.5 | 3.8 | 48 | 47.4 | 15.6 | 24 |
| 000509 | | uaaaauca | | gUfaUfaaccususc | | | | | | | |
| SRS- | 750 | asasucaaCfcAfaAfau | 350 | usGfsaucaAfcauuUfu | 1381 | 116.8 | 14.2 | 171 | 78.7 | 7.1 | 84 |
| 000510 | | guugauca | | GfgUfugauususu | | | | | | | |
| SRS- | 751 | asuscaacCfaAfaAfug | 351 | usGfsgaucAfacauUfu | 1382 | 65.2 | 1.7 | 53 | 50.9 | 5.8 | 30 |
| 000511 | | uugaucca | | UfgGfuugaususu | | | | | | | |
| SRS- | 752 | uscsaaccAfaAfaUfgu | 352 | usUfsggauCfaacaUfu | 1383 | 86.1 | 8.0 | 107 | 74.4 | 10.0 | 67 |
| 000512 | | ugauccaa | | UfuGfguugasusu | | | | | | | |
| SRS- | 753 | csasaccaAfaAfuGfuu | 353 | usAfsuggaUfcaacAfu | 1384 | 44.0 | 2.6 | 29 | 37.3 | 7.2 | 8 |
| 000513 | | gauccaua | | UfuUfgguugsasu | | | | | | | |
| SRS- | 754 | ascscaaaAfuGfuUfga | 354 | usGfsgaugGfaucaAfc | 1386 | 124.3 | 7.8 | 182 | 101.3 | 10.7 | 165 |
| 000514 | | uccaucca | | AfuUfuuggususg | | | | | | | |
| SRS- | 755 | cscsaaaaUfgUfuGfau | 355 | usUfsggauGfgaucAfa | 1387 | 69.5 | 10.7 | 63 | 78.5 | 9.1 | 82 |
| 000515 | | ccauccaa | | CfaUfuuuggsusu | | | | | | | |
| SRS- | 756 | asasccucAfuUfcCfaa | 356 | usCfsauuaAfcuugGfa | 1467 | 99.2 | 9.7 | 137 | 94.9 | 10.3 | 141 |
| 000516 | | guuaauga | | AfuGfagguusasa | | | | | | | |
| SRS- | 757 | asusaaucUfgGfuAfuu | 357 | usAfsggauUfuaauAfc | 1494 | 51.4 | 6.4 | 36 | 59.3 | 8.5 | 39 |
| 000517 | | aaauccua | | CfaGfauuaususa | | | | | | | |
| SRS- | 758 | asasucugGfuAfuUfaa | 358 | usUfsaaggAfuuuaAf | 1496 | 38.2 | 5.4 | 17 | 40.3 | 7.9 | 17 |
| 000518 | | auccuuaa | | uAfcCfagauusasu | | | | | | | |
| SRS- | 759 | uscsugguAfuUfaAfau | 359 | usCfsuuaaGfgauuUfa | 1498 | 74.2 | 7.4 | 76 | 74.9 | 10.5 | 68 |
| 000519 | | ccuuaaga | | AfuAfccagasusu | | | | | | | |
| SRS- | 760 | asusuuaaGfaUfuAfaa | 360 | usUfsuguaUfguuuAf | 1563 | 58.1 | 10.7 | 40 | 51.6 | 6.9 | 31 |
| 000520 | | cauacaaa | | aUfcUfuaaausasg | | | | | | | |
| SRS- | 761 | usasagauUfaAfaCfau | 361 | usUfsgauuGfuaugUf | 1566 | 63.9 | 6.5 | 49 | 72.6 | 17.8 | 62 |
| 000521 | | acaaucaa | | uUfaAfucuuasasa | | | | | | | |
| SRS- | 762 | uscsacauAfaCfcUfua | 362 | usUfsauucUfuuaaGfg | 1583 | 69.1 | 11.0 | 61 | 67.9 | 8.3 | 53 |
| 000522 | | aagaauaa | | UfuAfugugasusu | | | | | | | |
| SRS- | 763 | usgsugauGfuGfgGfaa | 363 | usAfsaauuGfauucCfc | 1654 | 69.7 | 7.4 | 64 | 82.0 | 14.7 | 93 |
| 000523 | | ucaauuua | | AfcAfucacasasa | | | | | | | |
| SRS- | 764 | gsgsgaauCfaAfuUfuu | 364 | usAfsccauCfuaaaAfu | 1662 | 103.3 | 13.1 | 146 | 93.3 | 3.7 | 130 |
| 000524 | | agauggua | | UfgAfuucccsasc | | | | | | | |
| SRS- | 765 | asgsgcauCfaUfaUfga | 365 | usUfsauuaGfcucaUfa | 1761 | 68.3 | 3.5 | 59 | 74.3 | 5.5 | 65 |
| 000525 | | gcuaauaa | | UfgAfugccususu | | | | | | | |
| SRS- | 766 | asuscauaUfgAfgCfua | 366 | usGfsugauAfuuagCf | 1765 | 87.8 | 9.0 | 111 | 95.4 | 9.3 | 142 |
| 000526 | | auaucaca | | uCfaUfaugausgsc | | | | | | | |
| SRS- | 767 | uscsauauGfaGfcUfaa | 367 | usUfsgugaUfauuaGfc | 1766 | 84.9 | 11.5 | 103 | 87.7 | 8.0 | 107 |
| 000527 | | uaucacaa | | UfcAfuaugasusg | | | | | | | |
| SRS- | 768 | gsusuaaaAfcUfcUfaa | 368 | usGfsucaaGfuuuaGfa | 1816 | 90.0 | 10.8 | 120 | 87.4 | 8.9 | 104 |
| 000528 | | acuugaca | | GfuUfuuaacsasa | | | | | | | |
| SRS- | 769 | usasaaacUfcUfaAfac | 369 | usUfsagucAfaguuUfa | 1818 | 70.6 | 11.2 | 68 | 77.7 | 7.6 | 77 |
| 000529 | | uugacuaa | | GfaGfuuuuasasc | | | | | | | |
| SRS- | 770 | ascsucuaAfaCfuUfga | 370 | usUfsauuuAfgucaAf | 1822 | 79.5 | 3.5 | 90 | 77.3 | 3.8 | 76 |
| 000530 | | cuaaauaa | | gUfuUfagagususu | | | | | | | |
| SRS- | 771 | asuscgucAfgCfaCfag | 371 | usAfscauaCfucugUfg | 1900 | 114.2 | 12.3 | 165 | 103.8 | 19.8 | 171 |
| 000531 | | aguaugua | | CfuGfacgaususu | | | | | | | |
| SRS- | 772 | gsascuacUfaAfgUfca | 372 | usGfsucaaUfgugaCfu | 2074 | 100.8 | 8.6 | 140 | 87.6 | 10.4 | 106 |
| 000532 | | cauugaca | | UfaGfuagucsasu | | | | | | | |
| SRS- | 773 | ascsaugaGfgUfaUfca | 373 | usGfsguauAfgugaUf | 2098 | 114.4 | 6.4 | 166 | 155.9 | 21.4 | 196 |
| 000533 | | cuauacca | | aCfcUfcaugususa | | | | | | | |
| SRS- | 774 | usgsgcauCfgAfgUfua | 374 | usUfsaaacUfuuaaCfu | 2231 | 77.2 | 4.5 | 81 | 83.7 | 13.8 | 97 |
| 000534 | | aaguuuaa | | CfgAfugccascsa | | | | | | | |
| SRS- | 775 | gsgscaucGfaGfuUfaa | 375 | usAfsuaaaCfuuuaAfc | 2232 | 77.2 | 2.2 | 80 | 84.9 | 6.7 | 100 |
| 000535 | | aguuuaua | | UfcGfaugccsasc | | | | | | | |
| SRS- | 776 | usasaaguUfuAfuAfuu | 376 | usUfsagggGfaaauAfu | 2242 | 79.9 | 4.7 | 91 | 101.4 | 13.5 | 166 |
| 000536 | | uccecuaa | | AfaAfcuuuasasc | | | | | | | |
| SRS- | 777 | ususaaacCfcAfuUfug | 377 | usCfscuuuAfacaaAfu | 2560 | 96.3 | 8.8 | 129 | 99.5 | 6.6 | 155 |
| 000537 | | uuaaagga | | GfgGfuuuaasusu | | | | | | | |
| SRS- | 778 | asusuuguUfaAfaGfga | 378 | usCfsacuaUfauccUfu | 2568 | 92.4 | 9.9 | 124 | 92.8 | 2.9 | 125 |
| 000538 | | uauaguga | | UfaAfcaaausgsg | | | | | | | |
| SRS- | 779 | ususuguuAfaAfgGfa | 379 | usGfscacuAfuaucCfu | 2569 | 84.1 | 16.1 | 100 | 99.1 | 6.0 | 152 |
| 000539 | | uauagugca | | UfuAfacaaasusg | | | | | | | |
| SRS- | 780 | usgsuuaaAfgGfaUfau | 380 | usGfsggcaCfuauaUfc | 2571 | 97.0 | 5.5 | 131 | 76.8 | 19.4 | 73 |
| 000540 | | agugccca | | CfuUfuaacasasa | | | | | | | |
| SRS- | 781 | gsusuaaaGfgAfuAfua | 381 | usUfsgggcAfcuauAf | 2572 | 85.0 | 6.0 | 104 | 83.0 | 5.4 | 94 |
| 000541 | | gugcccaa | | uCfcUfuuaacsasa | | | | | | | |
| SRS- | 782 | asasggauAfuAfgUfgc | 382 | usAfsacuuGfggcaCfu | 2576 | 99.4 | 2.0 | 138 | 93.5 | 11.5 | 132 |
| 000542 | | ccaaguua | | AfuAfuccuususa | | | | | | | |
| SRS- | 783 | asgsgauaUfaGfuGfcc | 383 | usUfsaacuUfgggcAfc | 2577 | 91.5 | 3.5 | 121 | 92.9 | 7.4 | 128 |
| 000543 | | caaguuaa | | UfaUfauccususu | | | | | | | |
| SRS- | 784 | gsgsauauAfgUfgCfcc | 384 | usAfsuaacUfugggCfa | 2578 | 99.0 | 7.4 | 136 | 92.5 | 7.2 | 124 |
| 000544 | | aaguuaua | | CfuAfuaucesusu | | | | | | | |
| SRS- | 785 | gsasuauaGfuGfcCfca | 385 | usUfsauaaCfuuggGfc | 2579 | 98.8 | 8.1 | 135 | 97.3 | 8.8 | 147 |
| 000545 | | aguuauaa | | AfcUfauaucscsu | | | | | | | |
| SRS- | 786 | asusggugAfcCfuAfcc | 386 | usUfsgacaAfagguAfg | 2598 | 101.5 | 14.2 | 141 | 106.7 | 8.7 | 179 |
| 000546 | | uuugucaa | | GfuCfaccausasu | | | | | | | |
| SRS- | 787 | usgsgugaCfcUfaCfcu | 387 | usUfsugacAfaaggUfa | 2599 | 96.0 | 5.6 | 128 | 100.7 | 14.1 | 162 |
| 000547 | | uugucaaa | | GfgUfcaccasusa | | | | | | | |
| SRS- | 788 | gsgsugacCfuAfcCfuu | 388 | usAfsuugaCfaaagGfu | 2600 | 85.7 | 8.5 | 106 | 83.1 | 7.6 | 95 |
| 000548 | | ugucaaua | | AfgGfucaccsasu | | | | | | | |
| SRS- | 789 | asasuuauCfcAfaUfau | 389 | usGfsacauGfuauaUfu | 2640 | 114.0 | 5.8 | 163 | 102.8 | 15.6 | 169 |
| 000549 | | acauguca | | GfgAfuaauususg | | | | | | | |
| SRS- | 790 | asusuuucAfgGfaCfca | 390 | usUfsagucUfguggUf | 2772 | 103.8 | 13.4 | 147 | 91.4 | 21.6 | 123 |
| 000550 | | cagacuaa | | cCfuGfaaaaususa | | | | | | | |
| SRS- | 791 | ususcaggAfcCfaCfag | 391 | usGfscuuaGfucugUf | 2775 | 130.4 | 12.7 | 186 | 104.2 | 11.4 | 172 |
| 000551 | | acuaagca | | gGfuCfcugaasasa | | | | | | | |
| SRS- | 792 | asgsgaccAfcAfgAfcu | 392 | usAfscagcUfuaguCfu | 2778 | 115.0 | 10.9 | 167 | 90.5 | 7.3 | 116 |
| 000552 | | aagcugua | | GfuGfguccusgsa | | | | | | | |
| SRS- | 793 | ususuuuuUfaGfgGfcc | 393 | usGfsuauuCfuggcCfc | 2813 | 122.1 | 13.9 | 180 | 139.2 | 42.1 | 195 |
| 000553 | | agaauaca | | UfaAfaaaaasusc | | | | | | | |
| SRS- | 794 | ususuuagGfgCfcAfga | 394 | usUfsugguAfuucuGf | 2816 | 118.3 | 14.9 | 173 | 100.0 | 15.3 | 158 |
| 000554 | | auaccaaa | | gCfcCfuaaaasasa | | | | | | | |
| SRS- | 795 | ususuaggGfcCfaGfaa | 395 | usUfsuuggUfauucUf | 2817 | 120.6 | 12.2 | 178 | 102.6 | 11.0 | 168 |
| 000555 | | uaccaaaa | | gGfcCfcuaaasasa | | | | | | | |
| SRS- | 796 | ususuaauAfuAfuGfag | 396 | usGfsaagcAfacucAfu | 2892 | 119.4 | 5.3 | 176 | 95.4 | 12.1 | 143 |
| 000556 | | uugcuuca | | AfuAfuuaaasusa | | | | | | | |

TABLE 7
Resuts of Dose Response In vitro of siRNAs targeting ANGPTL3

| | | SEQ | | SEQ | | IC₅₀ | IC₈₀ | MV | SD |
|---|---|---|---|---|---|---|---|---|---|
| Duplex | Transcript | ID | | ID | | @ | @ | max | max |
| ID | Position | NO. | Antisense strand sequence | NO. | Sense strand sequence | [μM] | [μM] | KD | KD |
| SRS- | 47 | 202 | usGfsgagcUfuaauUfgUfgAfacauu | 602 | asasuguuCfaCfaAfuuaagcu | 0.007 | 2.813 | 81 | 2 |
| 000363 | | | susu | | cca | | | | |
| SRS- | 49 | 203 | usAfsaggaGfcuuaAfuUfgUfgaaca | 603 | usgsuucaCfaAfuUfaagcucc | 0.020 | n/a | 70 | 2 |
| 000364 | | | susu | | uua | | | | |
| SRS- | 56 | 205 | usUfsaaaaAfgaagGfaGfcUfuaauu | 605 | asasuuaaGfcUfcCfuucuuuu | 0.005 | n/a | 78 | 1 |
| 000366 | | | sgsu | | uaa | | | | |
| SRS- | 71 | 207 | usUfsaacuAfgaggAfaCfaAfuaaaas | 607 | ususuuauUfgUfuCfcucuagu | 0.224 | n/a | 60 | 2 |
| 000368 | | | asg | | uaa | | | | |
| SRS- | 72 | 208 | usAfsuaacUfagagGfaAfcAfauaaas | 608 | ususuauuGfuUfcCfucuaguu | 0.019 | n/a | 70 | 3 |
| 000369 | | | asa | | aua | | | | |
| SRS- | 149 | 210 | usCfsuaacAfuagcAfaAfuCfuugau | 610 | asuscaagAfuUfuGfcuauguu | 0.728 | n/a | 58 | 2 |
| 000371 | | | susu | | aga | | | | |
| SRS- | 151 | 211 | usGfsucuaAfcauaGfcAfaAfucuug | 611 | csasagauUfuGfcUfauguuag | 0.283 | n/a | 61 | 2 |
| 000372 | | | sasu | | aca | | | | |
| SRS- | 154 | 214 | usAfsucguCfuaacAfuAfgCfaaauc | 614 | gsasuuugCfuAfuGfuuagacg | 0.854 | n/a | 54 | 1 |
| 000375 | | | susu | | aua | | | | |
| SRS- | 155 | 215 | usCfsaucgUfcuaaCfaUfaGfcaaaus | 615 | asusuugcUfaUfgUfuagacga | 1.461 | n/a | 59 | 2 |
| 000376 | | | csu | | uga | | | | |
| SRS- | 159 | 218 | usUfsuuacAfucguCfuAfaCfauagc | 618 | gscsuaugUfuAfgAfcgaugua | 0.047 | n/a | 75 | 1 |
| 000379 | | | sasa | | aaa | | | | |
| SRS- | 161 | 220 | usUfsuuuuAfcaucGfuCfuAfacaua | 620 | usasuguuAfgAfcGfauguaaa | 0.288 | n/a | 66 | 4 |
| 000381 | | | sgsc | | aaa | | | | |
| SRS- | 163 | 221 | usAfsauuuUfuacaUfcGfuCfuaaca | 621 | usgsuuagAfcGfaUfguaaaaa | 1.486 | n/a | 51 | 3 |
| 000382 | | | susa | | uua | | | | |
| SRS- | 165 | 222 | usAfsaaauUfuuuaCfaUfcGfucuaa | 622 | ususagacGfaUfgUfaaaaauu | 0.009 | 1.735 | 82 | 4 |
| 000383 | | | scsa | | uua | | | | |
| SRS- | 204 | 232 | usUfscuuuAfagacCfaUfgUfcccaas | 632 | ususgggaCfaUfgGfucuuaaa | 48.262 | n/a | 38 | 2 |
| 000393 | | | csu | | gaa | | | | |
| SRS- | 207 | 234 | usAfsagucUfuuaaGfaCfcAfugucc | 634 | gsgsacauGfgUfcUfuaaagac | n/a | n/a | 37 | 4 |
| 000395 | | | scsa | | uua | | | | |
| SRS- | 282 | 242 | usAfsgaucAfuaaaAfaGfaCfugauc | 642 | gsasucagUfcUfuUfuuaugau | 2.848 | n/a | 54 | 4 |
| 000403 | | | sasa | | cua | | | | |
| SRS- | 283 | 243 | usUfsagauCfauaaAfaAfgAfcugau | 643 | asuscaguCfuUfuUfuaugauc | 0.078 | n/a | 66 | 4 |
| 000404 | | | scsa | | uaa | | | | |
| SRS- | 354 | 244 | usUfsugacUfuguaGfuUfuAfuaugu | 644 | ascsauauAfaAfcUfacaaguc | 0.006 | n/a | 78 | 2 |
| 000405 | | | sasg | | aaa | | | | |
| SRS- | 396 | 245 | usUfsuugaGfuugaGfuUfcAfaguga | 645 | uscsacuuGfaAfcUfcaacuca | 0.010 | n/a | 77 | 3 |
| 000406 | | | scsa | | aaa | | | | |
| SRS- | 412 | 246 | usUfsaggaGfgcuuUfcAfaGfuuuug | 646 | csasaaacUfuGfaAfagccucc | 0.014 | 30.020 | 77 | 2 |
| 000407 | | | sasg | | uaa | | | | |
| SRS- | 473 | 250 | usUfsuaagUfuaguUfaGfuUfgcucu | 650 | asgsagcaAfcUfaAfcuaacuu | 0.014 | 2.834 | 82 | 2 |
| 000411 | | | susc | | aaa | | | | |
| SRS- | 474 | 251 | usAfsuuaaGfuuagUfuAfgUfugcuc | 651 | gsasgcaaCfuAfaCfuaacuua | 5.837 | n/a | 53 | 4 |
| 000412 | | | susu | | aua | | | | |
| SRS- | 485 | 252 | usGfsuugaUfuuugAfaUfuAfaguua | 652 | usasacuuAfaUfuCfaaaauca | 0.042 | n/a | 68 | 1 |
| 000413 | | | sgsu | | aca | | | | |
| SRS- | 520 | 253 | usAfsagugAfaguuAfcUfuCfugggu | 653 | ascsccagAfaGfuAfacuucac | 0.050 | n/a | 70 | 1 |
| 000414 | | | sgsu | | uua | | | | |
| SRS- | 521 | 254 | usUfsaaguGfaaguUfaCfuUfcuggg | 654 | cscscagaAfgUfaAfcuucacu | 0.563 | n/a | 53 | 15 |
| 000415 | | | susg | | uaa | | | | |
| SRS- | 553 | 255 | usGfsaugcUfauuaUfcUfuGfuuuuu | 655 | asasaaacAfaGfaUfaauagcau | 18.689 | n/a | 49 | 9 |
| 000416 | | | scsu | | ca | | | | |
| SRS- | 555 | 256 | usUfsugauGfcuauUfaUfcUfuguuu | 656 | asasacaaGfaUfaAfuagcauca | 0.023 | n/a | 73 | 3 |
| 000417 | | | susu | | aa | | | | |
| SRS- | 615 | 260 | usAfsuuugAfcuauGfcUfgUfuggu | 660 | asasccaaCfaGfcAfuagucaaa | 0.479 | n/a | 66 | 5 |
| 000421 | | | ususa | | ua | | | | |
| SRS- | 897 | 276 | usUfscuauUfcgauGfuUfgAfauuaa | 676 | ususaauuCfaAfcAfucgaaua | n/a | n/a | 11 | 18 |
| 000436 | | | susg | | gaa | | | | |
| SRS- | 898 | 277 | usAfsucuaUfucgaUfgUfuGfaauua | 677 | usasauucAfaCfaUfcgaauag | n/a | n/a | 30 | 11 |
| 000437 | | | sasu | | aua | | | | |
| SRS- | 942 | 296 | usCfscauaUfuuguAfgUfuCfuccca | 696 | usgsggagAfaCfuAfcaaauau | n/a | n/a | 21 | 24 |
| 000456 | | | scsg | | gga | | | | |
| SRS- | 966 | 298 | usAfsauucUfccauCfaAfgCfcucccs | 698 | gsgsgaggCfuUfgAfuggagaa | n/a | n/a | 51 | 6 |
| 000458 | | | asa | | uua | | | | |
| SRS- | 1007 | 307 | usAfsuugcUfucacUfaUfgGfaguau | 707 | asusacucCfaUfaGfugaagca | 0.728 | n/a | 61 | 3 |
| 000467 | | | sasu | | aua | | | | |
| SRS- | 1012 | 308 | usAfsuuagAfuugcUfuCfaCfuaugg | 708 | cscsauagUfgAfaGfcaaucua | 0.373 | n/a | 66 | 6 |
| 000468 | | | sasg | | aua | | | | |
| SRS- | 1014 | 309 | usUfsaauuAfgauuGfcUfuCfacuau | 709 | asusagugAfaGfcAfaucuaau | 0.115 | n/a | 70 | 2 |
| 000469 | | | sgsg | | uaa | | | | |
| SRS- | 1098 | 311 | usUfsugguUfucguGfaUfuUfcccaa | 711 | ususgggaAfaUfcAfcgaaacc | 4.966 | n/a | 60 | 6 |
| 000471 | | | sgsu | | aaa | | | | |
| SRS- | 1101 | 313 | usUfsaguuGfguuuCfgUfgAfuuucc | 713 | gsgsaaauCfaCfgAfaaccaacu | 0.025 | n/a | 70 | 6 |
| 000473 | | | scsa | | aa | | | | |
| SRS- | 1103 | 314 | usUfsauagUfugguUfuCfgUfgauuu | 714 | asasaucaCfgAfaAfccaacuau | 0.303 | n/a | 59 | 4 |
| 000474 | | | scSc | | aa | | | | |
| SRS- | 1179 | 335 | usCfsaaguAfgaaaAfcAfcCfaaaucs | 735 | gsasuuugGfuGfuUfuucuacu | 2.674 | n/a | 55 | 9 |
| 000495 | | | usu | | uga | | | | |
| SRS- | 1357 | 345 | usAfsgaguAfuaacCfuUfcCfauuuu | 745 | asasaaugGfaAfgGfuuauacu | 0.100 | n/a | 70 | 5 |
| 000505 | | | sgsa | | cua | | | | |
| SRS- | 1358 | 346 | usUfsagagUfauaaCfcUfuCfcauuu | 746 | asasauggAfaGfgUfuauacuc | 0.013 | 10.634 | 78 | 2 |
| 000506 | | | susg | | uaa | | | | |
| SRS- | 1363 | 348 | usUfsuuuaUfagagUfaUfaAfccuuc | 748 | gsasagguUfaUfaCfucuauaa | 0.265 | n/a | 66 | 4 |
| 000508 | | | scsa | | aaa | | | | |
| SRS- | 1365 | 349 | usGfsauuuUfauagAfgUfaUfaaccu | 749 | asgsguuaUfaCfuCfuauaaaa | n/a | n/a | 40 | 10 |
| 000509 | | | susc | | uca | | | | |
| SRS- | 1384 | 353 | usAfsuggaUfcaacAfuUfuUfgguug | 753 | csasaccaAfaAfuGfuugaucc | 0.030 | n/a | 68 | 6 |
| 000513 | | | sasu | | aua | | | | |
| SRS- | 1494 | 357 | usAfsggauUfuaauAfcCfaGfauuau | 757 | asusaaucUfgGfuAfuuaaauc | 0.305 | 54.336 | 67 | 5 |
| 000517 | | | susa | | cua | | | | |
| SRS- | 1496 | 358 | usUfsaaggAfuuuaAfuAfcCfagauu | 758 | asasucugGfuAfuUfaaauccu | 0.058 | 86.253 | 78 | 4 |
| 000518 | | | sasu | | uaa | | | | |
| SRS- | 1563 | 360 | usUfsuguaUfguuuAfaUfcUfuaaau | 760 | asusuuaaGfaUfuAfaacauac | 159.734 | n/a | 46 | 4 |
| 000520 | | | sasg | | aaa | | | | |
| SRS- | 1566 | 361 | usUfsgauuGfuaugUfuUfaAfucuua | 761 | usasagauUfaAfaCfauacaau | 0.629 | n/a | 56 | 5 |
| 000521 | | | sasa | | caa | | | | |

TABLE 8
Results of % change in serum hANGPTL3 protein levels
Percent Change in Serum hANGPTL3 Concentration from Day −4 Baseline

| | | | SRS- | | SRS- | | SRS- | | SRS- | | SRS- | | SRS- | | SRS- | |
|---|---|---|---|---|---|---|---|---|---|---|---|---|---|---|---|---|
| Study | Vehicle | | 000651 | | 000652 | | 000653 | | 000654 | | 000656 | | 000658 | | 000659 | |
| Day | Avg | SEM | Avg | SEM | Avg | SEM | Avg | SEM | Avg | SEM | Avg | SEM | Avg | SEM | Avg | SEM |
| −4 | 0.0 | 0.0 | 0.0 | 0.0 | 0.0 | 0.0 | 0.0 | 0.0 | 0.0 | 0.0 | 0.0 | 0.0 | 0.0 | 0.0 | 0.0 | 0.0 |
| 7 | 25.5 | 15.5 | −54.7 | 11.9 | 52.9 | 19.9 | 33.7 | 10.8 | −11.6 | 18.4 | −57.8 | 7.1 | −67.0 | 6.3 | −35.4 | 10.8 |
| 14 | −9.7 | 3.1 | −62.3 | 8.4 | 19.5 | 19.5 | 23.4 | 21.1 | 12.9 | 16.2 | −63.7 | 4.9 | −53.4 | 13.3 | 52.1 | 9.0 |
| 21 | 23.3 | 9.7 | −43.7 | 12.8 | 2.4 | 11.7 | 24.3 | 9.2 | 10.2 | 20.5 | −51.5 | 6.6 | −61.1 | 6.3 | 22.0 | 10.4 |
| 28 | 3.1 | 17.4 | −43.5 | 19.0 | −21.9 | 6.5 | 4.1 | 11.2 | −5.6 | 10.4 | −46.4 | 9.3 | −51.7 | 7.5 | 43.4 | 19.0 |
| 35 | −13.3 | 7.4 | −42.8 | 18.8 | −32.3 | 9.0 | 6.4 | 9.1 | −13.9 | 10.8 | −40.4 | 8.7 | −49.7 | 9.3 | 15.1 | 13.9 |
| 42 | 0.8 | 6.3 | −36.9 | 15.2 | −31.1 | 11.8 | 5.4 | 7.4 | 0.1 | 12.6 | −36.0 | 6.7 | −34.5 | 2.7 | 2.7 | 12.5 |
| 49 | −0.7 | 6.9 | −14.1 | 21.6 | −16.5 | 11.7 | 13.6 | 5.5 | 20.0 | 29.0 | −32.8 | 15.5 | −27.9 | 8.4 | 5.3 | 8.4 |
| 56 | −8.0 | 5.4 | −13.7 | 4.3 | 2.2 | 21.3 | 31.1 | 15.1 | −1.9 | 15.0 | −8.7 | 11.3 | −24.6 | 7.0 | 18.1 | 3.7 |
| 63 | 28.9 | 24.1 | 47.4 | 59.3 | −5.1 | 25.1 | 41.2 | 15.2 | 19.1 | 21.7 | −10.0 | 11.8 | −18.5 | 4.4 | 21.0 | 6.6 |

TABLE 9
Results of % change in serum hANGPTL3 protein levels
Percent Change in Serum hANGPTL3 Concentration from Day −4 Baseline

| | | | SRS- | | SRS- | | SRS- | | SRS- | | SRS- | | SRS- | |
|---|---|---|---|---|---|---|---|---|---|---|---|---|---|---|
| Study | Vehicle | | 000559 | | 000569 | | 000566 | | 000570 | | 000576 | | 000571 | |
| Day | Avg | SEM | Avg | SEM | Avg | SEM | Avg | SEM | Avg | SEM | Avg | SEM | Avg | SEM |
| −4 | 0.0 | 0.0 | 0.0 | 0.0 | 0.0 | 0.0 | 0.0 | 0.0 | 0.0 | 0.0 | 0.0 | 0.0 | 0.0 | 0.0 |
| 7 | −3.7 | 10.3 | 3.0 | 11.0 | −26.1 | 7.0 | −20.5 | 10.9 | −24.7 | 7.1 | −58.6 | 9.0 | −37.0 | 7.1 |
| 14 | −9.8 | 10.7 | −0.9 | 9.3 | −32.8 | 5.0 | −19.8 | 11.4 | −22.6 | 7.7 | −64.9 | 5.1 | −24.7 | 3.7 |
| 21 | −7.2 | 12.8 | −2.0 | 17.3 | 4.9 | 8.1 | 9.5 | 14.7 | −2.4 | 12.0 | −59.2 | 5.4 | −21.2 | 8.5 |
| 28 | −18.1 | 8.2 | −22.3 | 6.9 | −26.4 | 7.0 | −24.5 | 11.7 | −34.1 | 3.5 | −58.2 | 4.5 | −33.4 | 7.1 |
| 35 | −6.4 | 12.7 | −6.1 | 6.3 | 2.7 | 6.8 | −16.4 | 13.0 | −13.5 | 5.0 | −43.4 | 5.7 | −22.8 | 8.6 |
| 42 | 24.1 | 12.2 | 13.2 | 10.8 | 12.2 | 10.0 | −5.2 | 15.6 | −2.4 | 11.2 | −37.5 | 7.1 | −13.5 | 9.2 |
| 49 | −5.6 | 9.2 | −3.6 | 10.5 | −28.8 | 6.4 | −6.6 | 17.7 | 5.0 | 12.4 | −42.8 | 11.7 | −39.2 | 7.0 |
| 56 | −15.4 | 7.9 | −9.9 | 11.4 | −9.7 | 10.9 | −18.8 | 12.9 | −12.5 | 6.3 | −22.3 | 9.8 | −17.5 | 7.0 |
| 63 | 1.3 | 9.2 | 7.4 | 7.6 | 5.5 | 12.8 | −1.0 | 11.9 | −14.3 | 13.0 | −25.9 | 9.1 | −11.0 | 7.2 |

| | | | | |
|---|---|---|---|---|
| | SRS- | SRS- | SRS- | SRS- |
| Study | 000561 | 000572 | 000577 | 000651 |

| Day | Avg | SEM | Avg | SEM | Avg | SEM | Avg | SEM |
|---|---|---|---|---|---|---|---|---|
| −4 | 0.0 | 0.0 | 0.0 | 0.0 | 0.0 | 0.0 | 0.0 | 0.0 |
| 7 | −26.1 | 11.4 | −0.1 | 13.4 | −54.8 | 7.4 | −49.5 | 10.2 |
| 14 | −6.6 | 7.2 | −35.0 | 7.4 | −71.0 | 6.4 | −67.4 | 5.9 |
| 21 | 23.9 | 12.2 | −25.1 | 8.2 | −63.3 | 5.7 | −61.2 | 7.4 |
| 28 | −35.1 | 10.9 | −8.5 | 10.3 | −55.9 | 5.9 | −51.9 | 7.9 |
| 35 | 0.2 | 11.7 | −9.9 | 8.5 | −58.3 | 8.0 | −39.2 | 11.1 |
| 42 | 15.4 | 16.3 | 10.4 | 13.3 | −34.5 | 11.8 | −28.7 | 12.0 |
| 49 | 5.9 | 14.9 | 10.6 | 19.1 | −50.7 | 7.7 | −24.2 | 15.4 |
| 56 | −3.4 | 12.1 | −1.9 | 11.1 | −43.0 | 9.1 | −20.5 | 9.3 |
| 63 | 4.0 | 16.1 | −4.9 | 8.4 | −39.0 | 9.1 | −17.1 | 9.4 |

TABLE 10
Results of % change in serum hANGPTL3 protein levels
Percent Change in Serum hANGPTL3 Concentration from Day −4 Baseline

| | | | SRS- | | SRS- | | SRS- | | SRS- | | SRS- | |
|---|---|---|---|---|---|---|---|---|---|---|---|---|
| Study | Vehicle | | 000563 | | 000578 | | 000568 | | 000575 | | 000560 | |
| Day | Avg | SEM | Avg | SEM | Avg | SEM | Avg | SEM | Avg | SEM | Avg | SEM |
| −4 | 0.0 | 0.0 | 0.0 | 0.0 | 0.0 | 0.0 | 0.0 | 0.0 | 0.0 | 0.0 | 0.0 | 0.0 |
| 7 | −29.0 | 14.5 | −32.2 | 11.3 | −77.1 | 2.0 | −53.5 | 7.7 | −72.7 | 2.2 | −34.4 | 6.7 |
| 14 | −24.5 | 15.0 | −30.0 | 11.0 | −75.5 | 2.8 | −56.8 | 4.1 | −78.8 | 2.6 | −36.3 | 8.0 |
| 21 | −37.7 | 13.8 | −29.0 | 8.5 | −69.8 | 6.8 | −47.2 | 8.6 | −73.7 | 3.6 | −25.3 | 9.6 |
| 28 | −12.0 | 21.1 | −21.1 | 9.6 | −47.2 | 7.6 | −43.1 | 6.7 | −69.9 | 4.4 | −25.1 | 10.2 |
| | SRS- | | SRS- | | SRS- | | SRS- | | SRS- | | SRS- | |
| Study | 000650 | | 000564 | | 000657 | | 000661 | | 000655 | | 000651 | |
| Day | Avg | SEM | Avg | SEM | Avg | SEM | Avg | SEM | Avg | SEM | Avg | SEM |
| −4 | 0.0 | 0.0 | 0.0 | 0.0 | 0.0 | 0.0 | 0.0 | 0.0 | 0.0 | 0.0 | 0.0 | 0.0 |
| 7 | −57.5 | 4.4 | −39.1 | 5.1 | −74.6 | 2.3 | −56.0 | 3.9 | −67.4 | 2.0 | −75.1 | 1.9 |
| 14 | −57.7 | 5.6 | −29.9 | 3.5 | −83.0 | 1.8 | −72.4 | 3.4 | −80.8 | 2.1 | −81.4 | 2.0 |
| 21 | −56.0 | 3.3 | −28.9 | 6.5 | −79.5 | 2.0 | −60.7 | 2.6 | −77.4 | 2.0 | −71.3 | 3.8 |
| 28 | −61.6 | 2.9 | −24.8 | 5.8 | −65.7 | 4.3 | −49.4 | 3.6 | −70.2 | 2.5 | −60.2 | 6.0 |

TABLE 11
Results of % change in serum hANGPTL3 protein levels
Percent Change in Serum hANGPTL3 Concentration Relative to Vehicle

| | | | SRS- | | SRS- | | SRS- | | SRS- | | SRS- | |
|---|---|---|---|---|---|---|---|---|---|---|---|---|
| Study | Vehicle | | 001803 | | 001804 | | 001805 | | 001806 | | 001807 | |
| Day | Avg | SEM | Avg | SEM | Avg | SEM | Avg | SEM | Avg | SEM | Avg | SEM |
| −4 | 0.0 | 8.4 | −3.6 | 8.9 | −2.2 | 6.0 | −2.5 | 6.2 | −2.7 | 6.0 | −2.7 | 6.0 |
| 7 | 0.0 | 4.0 | −4.6 | 9.9 | −44.7 | 7.3 | −44.0 | 4.0 | −33.0 | 6.5 | −69.1 | 3.4 |
| 14 | 0.0 | 6.7 | −13.3 | 6.6 | −43.3 | 5.7 | −52.5 | 2.9 | −20.7 | 3.4 | −61.8 | 3.3 |
| 21 | 0.0 | 11.3 | −8.3 | 9.7 | −50.2 | 6.9 | −41.9 | 2.9 | −23.0 | 11.5 | −69.3 | 1.2 |
| 28 | 0.0 | 6.0 | 2.3 | 10.0 | −41.3 | 17.6 | −41.4 | 3.7 | −13.4 | 6.8 | −63.0 | 4.1 |
| 35 | 0.0 | 3.6 | −21.1 | 6.9 | −18.9 | 18.6 | −35.4 | 5.1 | −13.4 | 3.4 | −56.9 | 2.4 |
| 42 | 0.0 | 4.8 | −9.4 | 4.1 | −43.0 | 6.0 | −43.7 | 4.6 | −27.1 | 2.7 | −55.3 | 3.5 |
| | SRS- | | SRS- | | SRS- | | SRS- | | SRS- | | SRS- | |
| Study | 001808 | | 001809 | | 001810 | | 001811 | | 001812 | | 000651 | |
| Day | Avg | SEM | Avg | SEM | Avg | SEM | Avg | SEM | Avg | SEM | Avg | SEM |
| −4 | −3.2 | 6.0 | −4.3 | 5.8 | −4.8 | 5.3 | −5.4 | 5.1 | −4.8 | 5.2 | −3.5 | 4.1 |
| 7 | −68.4 | 4.5 | −34.0 | 1.9 | −80.5 | 2.7 | −37.3 | 7.4 | −46.7 | 4.9 | −71.3 | 3.4 |
| 14 | −70.3 | 3.1 | −40.6 | 5.0 | −76.3 | 7.1 | −12.7 | 7.0 | −10.2 | 9.2 | | |
| 21 | −64.8 | 2.8 | −46.2 | 3.4 | −81.2 | 2.5 | −53.2 | 4.5 | −54.9 | 1.6 | −72.9 | 2.4 |
| 28 | −48.9 | 6.0 | −39.4 | 4.8 | −69.2 | 5.7 | −41.9 | 2.2 | −41.0 | 4.9 | −69.1 | 2.5 |
| 35 | −52.4 | 1.9 | −35.5 | 5.8 | −58.2 | 3.8 | −33.3 | 5.7 | −37.3 | 2.0 | −57.9 | 2.5 |
| 42 | −38.8 | 2.1 | −37.7 | 4.2 | −57.4 | 3.6 | −42.0 | 4.8 | −33.6 | 2.5 | −55.7 | 2.2 |

TABLE 12
Results of % change in serum ANGPTL3 protein levels in cynomolgus monkeys
% Change in Serum ANGPTL3 Relative to Day 1 Following Single
2 mg/kg Dose in Cynomolgus Monkeys

| Duplex | | | Study Day | | | | | | | | | | |
|---|---|---|---|---|---|---|---|---|---|---|---|---|---|
| ID | Dose | Statistic | 1 | 4 | 8 | 11 | 15 | 22 | 29 | 36 | 43 | 50 | 57 |
| Saline | 2 mg/kg | Mean | 0.0 | 9.4 | −11.9 | −4.0 | −38.9 | 12.4 | 18.6 | −11.6 | −14.5 | 1.3 | −30.8 |
| | | SD | 0.0 | 30.6 | 26.8 | 8.8 | 13.8 | 9.5 | 19.9 | 12.0 | 12.2 | 27.5 | 13.2 |
| | | N | 4 | 4 | 4 | 4 | 4 | 4 | 4 | 4 | 4 | 4 | 4 |
| SRS- | 2 mg/kg | Mean | 0.0 | −37.8 | −56.5 | −74.3 | −78.4 | −71.9 | −76.8 | −75.0 | −77.9 | −72.5 | −78.7 |
| 001704 | | SD | 0.0 | 34.3 | 14.9 | 9.8 | 10.1 | 15.0 | 13.2 | 9.9 | 9.0 | 12.2 | 8.6 |
| | | N | 4 | 4 | 4 | 4 | 4 | 4 | 4 | 4 | 4 | 4 | 4 |
| SRS- | 2 mg/kg | Mean | 0.0 | −35.3 | −47.5 | −65.3 | −72.8 | −56.4 | −61.8 | −65.2 | −67.6 | −54.6 | −75.1 |
| 000656 | | SD | 0.0 | 9.3 | 9.0 | 4.0 | 7.8 | 8.6 | 8.6 | 9.4 | 9.7 | 6.0 | 7.6 |
| | | N | 4 | 4 | 4 | 4 | 4 | 4 | 4 | 4 | 4 | 4 | 4 |
| SRS- | 2 mg/kg | Mean | 0.0 | −62.5 | −74.6 | −82.6 | −87.7 | −86.5 | −87.2 | −87.0 | −87.9 | −80.3 | −85.0 |
| 000658 | | SD | 0.0 | 11.5 | 7.6 | 7.0 | 4.2 | 2.9 | 5.9 | 4.0 | 5.0 | 8.9 | 9.2 |
| | | N | 4 | 4 | 4 | 4 | 4 | 4 | 4 | 4 | 4 | 4 | 4 |
| SRS- | 2 mg/kg | Mean | 0.0 | −35.5 | −53.5 | −69.9 | −75.9 | −67.1 | −75.4 | −71.8 | −74.9 | −63.8 | −72.8 |
| 000576 | | SD | 0.0 | 22.2 | 13.8 | 10.1 | 8.0 | 12.0 | 9.0 | 10.8 | 9.6 | 13.3 | 11.0 |
| | | N | 4 | 4 | 4 | 4 | 4 | 4 | 4 | 4 | 4 | 4 | 4 |
| SRS- | 2 mg/kg | Mean | 0.0 | −32.6 | −66.9 | −69.4 | −76.3 | −66.0 | −72.8 | −64.9 | −76.5 | −64.5 | −77.8 |
| 000577 | | SD | 0.0 | 40.0 | 12.6 | 11.9 | 8.3 | 15.5 | 19.1 | 18.9 | 7.5 | 14.2 | 16.7 |
| | | N | 4 | 4 | 4 | 4 | 4 | 4 | 4 | 4 | 4 | 4 | 4 |
| SRS- | 2 mg/kg | Mean | 0.0 | 6.0 | −9.6 | −39.1 | −37.7 | −33.9 | −24.7 | −40.0 | −42.7 | — | — |
| 000578 | | SD | 0.0 | 50.7 | 19.8 | 4.4 | 16.9 | 18.1 | 25.3 | 19.5 | 11.1 | — | — |
| | | N | 4 | 4 | 4 | 4 | 4 | 4 | 4 | 4 | 4 | — | — |
| SRS- | 2 mg/kg | Mean | 0.0 | −3.8 | −51.8 | −58.1 | −64.6 | −63.3 | −57.8 | −64.4 | −67.2 | −52.7 | −66.3 |
| 000657 | | SD | 0.0 | 22.3 | 9.1 | 11.0 | 5.2 | 12.2 | 8.5 | 5.3 | 6.7 | 15.9 | 9.6 |
| | | N | 4 | 4 | 4 | 4 | 4 | 4 | 4 | 4 | 4 | 4 | 4 |
| SRS- | 2 mg/kg | Mean | 0.0 | −13.5 | −52.5 | −59.4 | −63.8 | −65.0 | −58.9 | −58.1 | −61.5 | −48.1 | −64.9 |
| 000655 | | SD | 0.0 | 22.3 | 14.6 | 18.5 | 16.7 | 15.6 | 19.4 | 21.0 | 9.5 | 25.6 | 16.4 |
| | | N | 4 | 4 | 4 | 4 | 4 | 4 | 4 | 4 | 4 | 4 | 4 |

| Duplex | | | Study Day | | | | | | | | | |
|---|---|---|---|---|---|---|---|---|---|---|---|---|
| ID | Dose | Statistic | 64 | 71 | 78 | 85 | 92 | 99 | 113 | 127 | 141 | 155 |
| Saline | 2 mg/kg | Mean | −12.7 | −13.3 | −18.6 | −5.7 | 1.9 | −5.8 | — | — | — | — |
| | | SD | 6.8 | 24.4 | 11.0 | 29.8 | 13.9 | 31.4 | — | — | — | — |
| | | N | 4 | 4 | 4 | 4 | 4 | 4 | — | — | — | — |
| SRS- | 2 mg/kg | Mean | −70.0 | −72.1 | −67.9 | −66.5 | −63.0 | −58.0 | −47.8 | −45.1 | −31.4 | −43.0 |
| 001704 | | SD | 14.9 | 13.0 | 13.5 | 13.4 | 14.2 | 16.8 | 27.2 | 22.7 | 38.0 | 31.7 |
| | | N | 4 | 4 | 4 | 4 | 4 | 4 | 4 | 4 | 4 | 4 |
| SRS- | 2 mg/kg | Mean | −60.2 | −56.7 | −49.8 | −44.4 | −42.6 | −42.8 | −45.2 | −41.3 | −26.5 | −17.8 |
| 000656 | | SD | 3.2 | 17.2 | 11.4 | 13.8 | 12.4 | 11.4 | 8.3 | 5.7 | 15.0 | 31.1 |
| | | N | 4 | 4 | 4 | 4 | 4 | 4 | 4 | 4 | 4 | 4 |
| SRS- | 2 mg/kg | Mean | −81.9 | −81.7 | −76.4 | −77.5 | −68.5 | −71.2 | −60.6 | −59.4 | −57.5 | −51.2 |
| 000658 | | SD | 8.0 | 4.7 | 9.4 | 11.3 | 13.4 | 11.4 | 9.1 | 16.5 | 10.9 | 13.6 |
| | | N | 4 | 4 | 4 | 4 | 4 | 4 | 4 | 4 | 4 | 4 |
| SRS- | 2 mg/kg | Mean | −61.7 | −64.6 | −60.1 | −56.7 | −49.2 | −50.2 | −23.9 | −26.6 | −10.1 | −25.1 |
| 000576 | | SD | 18.3 | 16.7 | 14.8 | 20.6 | 25.8 | 19.8 | 29.7 | 33.1 | 31.3 | 20.3 |
| | | N | 4 | 4 | 4 | 4 | 4 | 4 | 4 | 4 | 4 | 4 |
| SRS- | 2 mg/kg | Mean | −70.4 | −64.7 | −55.1 | −60.0 | −64.4 | −67.3 | −45.7 | −57.0 | −45.2 | −39.0 |
| 000577 | | SD | 14.5 | 20.8 | 19.3 | 16.3 | 14.4 | 17.2 | 28.9 | 9.7 | 28.7 | 27.0 |
| | | N | 4 | 4 | 4 | 4 | 4 | 4 | 4 | 4 | 4 | 4 |
| SRS- | 2 mg/kg | Mean | — | — | — | — | — | — | — | — | — | — |
| 000578 | | SD | — | — | — | — | — | — | — | — | — | — |
| | | N | — | — | — | — | — | — | — | — | — | — |
| SRS- | 2 mg/kg | Mean | −59.3 | −67.7 | −59.0 | −60.6 | −31.7 | −33.9 | −26.0 | −6.4 | −8.2 | 16.1 |
| 000657 | | SD | 13.6 | 6.2 | 13.5 | 10.8 | 28.6 | 26.1 | 32.3 | 63.5 | 35.6 | 75.8 |
| | | N | 4 | 4 | 4 | 4 | 4 | 4 | 4 | 4 | 4 | 4 |
| SRS- | 2 mg/kg | Mean | −59.4 | −68.7 | −55.7 | −59.5 | −33.3 | −43.3 | −49.0 | −43.2 | −30.6 | −42.2 |
| 000655 | | SD | 18.2 | 13.9 | 16.0 | 13.9 | 29.2 | 21.3 | 17.2 | 14.7 | 19.3 | 13.7 |
| | | N | 4 | 4 | 4 | 4 | 4 | 4 | 4 | 4 | 4 | 4 |

TABLE 13
Results of % change in serum hANGPTL3 protein levels
Percent Change in Serum hANGPTL3 Concentration Relative to Vehicle

| | | | SRS- | | SRS- | | SRS- | | SRS- | | SRS- | | SRS- | |
|---|---|---|---|---|---|---|---|---|---|---|---|---|---|---|
| Study | PBS | | 000658 | | 002032 | | 002024 | | 002045 | | 002052 | | 002047 | |
| Day | Avg | SEM | Avg | SEM | Avg | SEM | Avg | SEM | Avg | SEM | Avg | SEM | Avg | SEM |
| −4 | 0 | 8.8 | −0.3 | 8.7 | −0.6 | 8.0 | −0.7 | 9.8 | −0.2 | 7.7 | −0.8 | 7.9 | −0.2 | 10.3 |
| 7 | 0 | 9.5 | −74.4 | 0.7 | −55.1 | 4.3 | −18.9 | 4.6 | −25.9 | 7.6 | −39.0 | 5.4 | −56.6 | 1.7 |
| 14 | 0 | 3.9 | −69.4 | 3.5 | −27.9 | 5.8 | −9.3 | 5.8 | 1.3 | 2.9 | −21.1 | 5.6 | −40.2 | 3.3 |
| 21 | 0 | 19.9 | −71.5 | 3.3 | −32.7 | 4.4 | −15.1 | 8.5 | −20.3 | 6.9 | −27.1 | 8.5 | −50.0 | 2.8 |
| 28 | 0 | 13.7 | −42.2 | 10.9 | −5.0 | 5.9 | 1.7 | 8.5 | 6.0 | 11.3 | −12.0 | 7.1 | −22.5 | 4.8 |
| 35 | 0 | 10.4 | −21.4 | 10.0 | 2.5 | 8.9 | 23.8 | 7.5 | 33.5 | 12.1 | 8.1 | 7.0 | −9.9 | 5.1 |

| | SRS- | | SRS- | | SRS- | | SRS- | | SRS- | | SRS- | |
|---|---|---|---|---|---|---|---|---|---|---|---|---|
| Study | 002053 | | 002034 | | 002028 | | 002049 | | 002050 | | 002051 | |
| Day | Avg | SEM | Avg | SEM | Avg | SEM | Avg | SEM | Avg | SEM | Avg | SEM |
| −4 | −0.2 | 9.5 | −0.8 | 8.3 | 0.0 | 10.5 | −0.1 | 10.7 | 0.0 | 10.4 | −1.1 | 12.3 |
| 7 | −33.2 | 6.2 | −58.4 | 1.8 | −33.2 | 5.3 | −56.2 | 2.8 | −73.0 | 2.9 | −65.2 | 1.5 |
| 14 | 1.6 | 8.6 | −25.2 | 4.4 | 3.0 | 8.8 | −27.0 | 4.1 | −81.6 | 4.3 | −53.9 | 2.6 |
| 21 | −38.4 | 5.0 | −52.5 | 3.2 | −27.8 | 4.5 | −32.9 | 5.6 | −76.7 | 2.3 | −71.4 | 2.1 |
| 28 | −16.5 | 11.8 | −12.0 | 4.7 | 24.6 | 9.2 | 2.8 | 9.5 | −58.1 | 1.3 | −53.2 | 1.8 |
| 35 | 13.5 | 10.0 | 35.8 | 32.5 | 49.1 | 11.2 | 5.8 | 7.5 | −56.7 | 5.8 | −36.2 | 3.7 |

What is claimed is:

1. A polynucleic acid molecule for modulating an expression of Angiopoietin-like protein 3 (ANGPTL3) gene, wherein the polynucleic acid molecule comprises a nucleic acid sequence in Table 1, Table 2, Table 3, or Table 4.

2. The polynucleic acid molecule of claim 1, wherein the polynucleic acid molecule is a single-stranded nucleic acid molecule.

3. The polynucleic acid molecule of claim 2, wherein the single-stranded nucleic acid molecule comprises at least 14, 15, 16, 17, 18 consecutive nucleotides that are complementary to a nucleic acid sequence selected from SEQ ID NOs: 401-596, 819-828, and 870-875, with no more than 1, 2, 3, 4 mismatches.

4. The polynucleic acid molecule of any one claims 2-3, wherein the single-stranded nucleic acid molecule comprises a sequence that is at least 80%, at least 85%, at least 90%, or at least 95% complementary to a nucleic acid sequence selected from SEQ ID NOs: 401-596, 819-828, and 870-875.

5. The polynucleic acid molecule of claim 1, wherein the polynucleic acid molecule is a double-stranded nucleic acid molecule comprising a passenger strand and a guide strand.

6. The polynucleic acid molecule of claim 5, wherein the passenger strand comprises a nucleic acid sequence that is at least 80%, at least 85%, at least 90%, or at least 95% identical to a nucleic acid sequence selected from SEQ ID NOs: 401-596, 819-828, and 870-875.

7. The polynucleic acid molecule of any one of claims 5-6, wherein the guide strand comprises a nucleic acid sequence that is at least 80%, at least 85%, at least 90%, or at least 95% identical to a nucleic acid sequence selected from SEQ ID NOs: 1-196, 797-806, and 850-857.

8. The polynucleic acid molecule of any one of claims 5-7, wherein the passenger strand comprises a nucleic acid sequence comprising at least 14, 15, 16, 17, 18, 19, or 20 consecutive sequences of a sequence selected from SEQ ID NOs: 401-596, 819-828, and 870-875 with no more than 1, 2, 3, or 4 mismatches.

9. The polynucleic acid molecule of any one of claims 5-8, wherein the guide strand comprises a nucleic acid sequence comprising at least 14, 15, 16, 17, 18, 19, 20, 21, or 22 consecutive sequences of a sequence selected from SEQ ID NOs: SEQ ID NOs: 1-196, 797-806, and 850-857 with no more than 1, 2, 3, or 4 mismatches.

10. The polynucleic acid molecule of any one of claims 5-9, wherein the passenger strand comprises a nucleic acid sequence selected from SEQ ID NOs: 401-596, 819-828, and 870-875 and the guide strand comprises a nucleic acid sequence selected from SEQ ID NOs: 1-196, 797-806, and 850-857.

11. The polynucleic acid molecule of claim 5, wherein the passenger strand comprises a nucleic acid sequence that is at least 90%, or at least 95% identical to a nucleic acid sequence selected from Table 3 (SEQ ID NOs: 405, 407, 408, 411, 418, 420, 422, 440, 443-446, 450, 452, 453, 456, 508, 509, 513, 514, 545, 546, 548, 553, 557, 558, 819-828, and 870-875).

12. The polynucleic acid molecule of any one of claims 5 or 11, wherein the guide strand comprises a nucleic acid sequence that is at least 90%, or at least 95% identical to a nucleic acid sequence selected from Table 3 (SEQ ID NOs: 5, 7, 8, 11, 18, 20, 22, 40, 43, 44, 45, 46, 50, 52, 53, 56, 108, 109, 113, 114, 145, 146, 148, 153, 157, 158, 797-806, and 850-857.

13. The polynucleic acid molecule of any one of claims 5, 11, or 12, wherein the passenger strand comprises a nucleic acid sequence selected from Table 3 (SEQ ID NOs: 405, 407, 408, 411, 418, 420, 422, 440, 443-446, 450, 452, 453, 456, 508, 509, 513, 514, 545, 546, 548, 553, 557, 558, 819-828, and 870-875) and the guide strand comprises a sequence selected from a nucleic acid sequence selected from SEQ ID NOs: Table 3 (SEQ ID NOs: 5, 7, 8, 11, 18, 20, 22, 40, 43, 44, 45, 46, 50, 52, 53, 56, 108, 109, 113, 114, 145, 146, 148, 153, 157, 158, 797-806, and 850-857).

14. The polynucleic acid molecule of any one of claims 1-13, wherein the polynucleic acid molecule comprises (1) a 2′-fluoro modified nucleotide; (2) a 2′-O-methyl modified nucleotide; (3) 2′-deoxy modified nucleotide; or (4) a modified intemucleotide linkage.

15. The polynucleic acid molecule of any one of claims 1-14, wherein the polynucleic acid molecule comprises at least two consecutive modified intemucleotide linkages at the 5′ end.

16. The polynucleic acid molecule of any one of claims 5-15, wherein the guide strand comprises at least two intemucleotide linkages among 3 intemucleotide linkages at the 3′end substituted with modified intemucleotide linkages.

17. The polynucleic acid molecule of any one of claims 5-16, wherein the guide strand comprises 5′-nNfnnnNfnNfNfnnnnNfnNfnnnnnnn-3′, 5′-nNfnnnNfnnnnnnnNfnNfnnnnnnn-3′, 5′-nNfnnnnNfnnnnNfnNfnnnnnnnnn-3′, 5′-nNfnnnnNfnnnnNfnNfnNfnnnnnnn-3′, or 5′-nNfnnnnnnnnnNfnNfnNfnnnnnnn-3′, wherein “Nf” stands for a 2′-fluoro modified nucleotide, and wherein “n” stands for a 2′-O-methyl modified nucleotide.

18. The polynucleic acid molecule of any one of claims 5-16, wherein the passenger strand comprises 5′-nnnnnnNfnNfnNfnnnnnnnnnn-3′, 5′-nnnnnnNfnNfNfNfmrnnnnnnnn-3′, or 5′-nnnnnnnnNfNfNfnnnnnnnnnn-3′, wherein “Nf” stands for a 2′-fluoro modified nucleotide, and wherein “n” stands for a 2′-O-methyl modified nucleotide.

19. The polynucleic acid molecule of any one of claims 5-16, wherein the passenger strand comprises 5′-NfnNfnNfnNfnNfNfNfnNfnNfnNfnNfnNf-3′, wherein the guide strand comprises 5′-nNfnNfnNfnNfnNfnnnNfnNfnNfnNfnnn-3′, wherein “Nf” stands for a 2′-fluoro modified nucleotide, and wherein “n” stands for a 2′-O-methyl modified nucleotide.

20. The polynucleic acid molecule of any one of claims 5-16, wherein the passenger strand comprises 5′-nnnnnnNfnNfNfNfmrnnnnnnnn-3′, wherein the guide strand comprises 5′-nNfnnnNfnNfNfnnnnNfnNfnnnnnnn-3′, wherein “Nf” stands for a 2′-fluoro modified nucleotide, and wherein “n” stands for a 2′-O-methyl modified nucleotide.

21. The polynucleic acid molecule of any one of claims 5-16, wherein the passenger strand comprises 5′-nnnnnnnnNfnNfnnnnnnnnn-3′, wherein the guide strand comprises 5′-nNfnnnnnnnnnNfnNfnnnnnnnnn-3′, wherein “Nf” stands for a 2′-fluoro modified nucleotide, and wherein “n” stands for a 2′-O-methyl modified nucleotide.

22. The polynucleic acid molecule of any one of claims 5-16, wherein the passenger strand comprises 5′-nnnnnnNfnNfnNfnnnnnnnnnn-3′, wherein the guide strand comprises 5′-nNfnnnnnnnnnNfnNfnNfnnnnnnn-3′, wherein “Nf” stands for a 2′-fluoro modified nucleotide, and wherein “n” stands for a 2′-O-methyl modified nucleotide.

23. The polynucleic acid molecule of any one of claims 5-16, wherein the passenger strand comprises 5′-nnnnnnNfnNfnNfnnnnnnnnnn-3′, wherein the guide strand comprises 5′-nNfnnnnNfnnnnNfnNfnNfnnnnnnn-3′, wherein “Nf” stands for a 2′-fluoro modified nucleotide, and wherein “n” stands for a 2′-O-methyl modified nucleotide.

24. The polynucleic acid molecule of any one of claims 14-23, wherein the modified intemucleotide linkage is a phosphorothioate intemucleotide linkage.

25. The polynucleic acid molecule of claim 24, wherein the modified intemucleotide linkage comprises a stereochemically enriched phosphorothioate intemucleotide linkage.

26. The polynucleic acid molecule of any one of claims 5-25, wherein the guide strand comprises a nucleotide analogue selected from a group consisting of acyclic L-threoninol nucleic acid-thymine-3′-phosphate (T-T), acyclic L-threoninol nucleic acid-adenine-3′-phosphate (T-A), acyclic N-acetyl L-threoninol abasic nucleic acid-3′phosphate (T-NAc), and 1′,2′-Dideoxyribose-3′phosphate (dAB).

27. The polynucleic acid molecule of claim 26, wherein the nucleotide analogue is located at a seed region of the guide strand (positions 2-8) from the 5′ end.

28. The polynucleic acid molecule of any one of claims 14-27, wherein the passenger strand comprises a nucleic acid sequence that is at least 80%, at least 85%, at least 90%, or at least 95% identical to a nucleic acid sequence selected from SEQ ID NOs: 601-796, 830-839, and 876-881.

29. The polynucleic acid molecule of any one of claims 14-28, wherein the guide strand comprises a nucleic acid sequence that is at least 80%, at least 85%, at least 90%, or at least 95% identical to a nucleic acid sequence selected from SEQ ID NOs: 201-396, 808-817, and 858-868.

30. The polynucleic acid molecule of any one of claims 14-29, wherein the passenger strand comprises a nucleic acid sequence selected from SEQ ID NOs: 601-796, 830-839, and 876-881, and the guide strand comprises a nucleic acid sequence selected from SEQ ID NOs: 201-396, 808-817, and 858-868.

31. The polynucleic acid molecule of any one of claims 1-30, wherein the polynucleic acid molecule is 19-25 nucleotides in length.

32. The polynucleic acid molecule of any one of claims 1-30, wherein the polynucleic acid molecule is 21-23 nucleotides in length.

33. A polynucleic acid molecule for modulating expression of Angiopoietin-like protein 3 (ANGPTL3) gene, wherein the polynucleic acid molecule comprises:
(a) a guide strand comprising the nucleotide sequence selected from SEQ ID NOs: 5, 7, 8, 11, 18, 20, 22, 40, 43, 44, 45, 46, 50, 52, 53, 56, 108, 109, 113, 114, 145, 146, 148, 153, 157, 158, 797-806, and 850-857, and a passenger strand comprising the nucleotide sequence selected from SEQ ID NOs: 405, 407, 408, 411, 418, 420, 422, 440, 443-446, 450, 452, 453, 456, 508, 509, 513, 514, 545, 546, 548, 553, 557, 558, 819-828, and 870-875;
(b) a guide strand comprising the nucleotide sequence selected from SEQ ID NOs: 205, 207, 208, 211, 218, 220, 222, 240, 243-246, 250, 252, 253, 256, 308, 309, 313, 314, 345, 346, 348, 353, 357, 358, 808-817, and 858-868, and a passenger strand comprising the nucleotide sequence selected from SEQ ID NOs: 605, 607, 608, 611, 618, 620, 622, 640, 643, 644, 645, 646, 650, 652, 653, 656, 708, 709, 713, 714, 745, 746, 748, 753, 757, 758, 830-839, and 876-881;
(c) a guide strand comprising the nucleotide sequence of usUfsaguuGfguuuCfgUfgAfuuuccscsa (SEQ ID NO: 313) and a passenger strand comprising the nucleotide sequence of gsgsaaauCfaCfgAfaaccaacuaa (SEQ ID NO: 713);
(d) a guide strand comprising the nucleotide sequence of usUfsagagUfauaaCfcUfuCfcauuususg (SEQ ID NO: 346) and a passenger strand comprising the nucleotide sequence of asasauggAfaGfgUfuauacucuaa (SEQ ID NO: 746);
(e) a guide strand comprising the nucleotide sequence of usAfsuggaUfcaacAfuUfuUfgguugsasu (SEQ ID NO: 353) and a passenger strand comprising the nucleotide sequence of csasaccaAfaAfuGfuugauccaua (SEQ ID NO: 753);
(f) a guide strand comprising the nucleotide sequence of usUfsaaggAfuuuaAfuAfcCfagauusasu (SEQ ID NO: 358) and a passenger strand comprising the nucleotide sequence of asasucugGfuAfuUfaaauccuuaa (SEQ ID NO: 758);
(g) a guide strand comprising the nucleotide sequence of usAfsuuagAfuugcUfuCfaCfuauggsasg (SEQ ID NO: 308) and a passenger strand comprising the nucleotide sequence of cscsauagUfgAfaGfcaaucuaaua (SEQ ID NO: 708);
(h) a guide strand comprising the nucleotide sequence of usUfsauagUfugguUfuCfgUfgauuuscsc (SEQ ID NO: 314) and a passenger strand comprising the nucleotide sequence of asasaucaCfgAfaAfccaacuauaa (SEQ ID NO: 714);
(i) a guide strand comprising the nucleotide sequence of usAfsgaguAfuaacCfuUfcCfauuuusgsa (SEQ ID NO: 345) and a passenger strand comprising the nucleotide sequence of asasaaugGfaAfgGfuuauacucua (SEQ ID NO: 745);
(j) a guide strand comprising the nucleotide sequence of usUfsaauuAfgauuGfcUfuCfacuausgsg (SEQ ID NO: 309) and a passenger strand comprising the nucleotide sequence of asusagugAfaGfcAfaucuaauuaa (SEQ ID NO: 709);
(k) a guide strand comprising the nucleotide sequence of usAfsauuaGfauugCfuUfcAfcuaugsgsa (SEQ ID NO: 815) and a passenger strand comprising the nucleotide sequence of csasuaguGfaAfgCfaaucuaauua (SEQ ID NO: 837);
(1) a guide strand comprising the nucleotide sequence of usUfsucauUfgaagUfuUfuGfugaucscsa (SEQ ID NO: 812) and a passenger strand comprising the nucleotide sequence of gsasucacAfaAfaCfuucaaugaaa (SEQ ID NO: 834);
(m) a guide strand comprising the nucleotide sequence of usAfsuugcUfucacUfaUfgGfaguausasu (SEQ ID NO: 813) and a passenger strand comprising the nucleotide sequence of asusacucCfaUfaGfugaagcaaua (SEQ ID NO: 835);
(n) a guide strand comprising the nucleotide sequence of usAfsgaguAfuaacCfuUfcCfauuucsgsa (SEQ ID NO: 865) and a passenger strand comprising the nucleotide sequence of gsasaaugGfaAfgGfuuauacucua (SEQ ID NO: 879); or
(o) a guide strand comprising the nucleotide sequence of usAfsgaguAfuaacCfuUfcCfauuccsgsa (SEQ ID NO: 866) and a passenger strand comprising the nucleotide sequence of gsgsaaugGfaAfgGfuuauacucua (SEQ ID NO: 880),
where smaller case “n” stands for 2′-O-methyl modified nucleotide, upper case followed with an “f” (i.e., “Nf”) stands for 2′-fluoro modified nucleotide, and “s” stands for 3′-phosphorothioate.

34. A polynucleic acid molecule conjugate for modulating an expression of Angiopoietin-like protein 3 (ANGPTL3) gene, wherein the polynucleic acid molecule conjugate comprises a polynucleic acid molecule of any one of claims 1-33 and an asialoglycoprotein receptor targeting moiety.

35. The polynucleic acid molecule conjugate of claim 34, wherein the polynucleic acid molecule and the asialoglycoprotein receptor targeting moiety is coupled via a linker.

36. The polynucleic acid molecule conjugate of claim 35, wherein the linker comprises formula (IV) below, [chemical structure]
wherein at least one of Y1 and Y2 is a nucleotide in the polynucleic acid molecule.

37. The polynucleic acid molecule conjugate of claim 36, wherein the Y1 is the last nucleotide on the 3′ end of the passenger strand of the polynucleic acid molecule.

38. The polynucleic acid molecule conjugate of claim 36, wherein the Y1 and Y2 are two consecutive nucleotides in the polynucleic acid molecule.

39. The polynucleic acid molecule conjugate of any one of claims 34-38, wherein the asialoglycoprotein receptor targeting moiety comprises N-Acetylgalactosamine (GalNAc).

40. The polynucleic acid molecule conjugate of any one of claims 34-39, wherein the linker and the asialoglycoprotein receptor targeting moiety with the last nucleotide on the 3′ end of the passenger strand of the polynucleic acid molecule are shown in: [chemical structure] [chemical structure]
wherein Z in formula (V′), (V″″), (V″″′) or (V″″″) is —H, —OH, —O-Methyl, —F, or —O— methoxyethyl, and R in formula (V′), (V″″), (V″″′), or (V″″″) is adenine, uracil, guanine, cytosine, thymine, abasic, or others.

41. A pharmaceutical composition comprising a polynucleic acid molecule of any one of claims 1-33 or a polynucleic acid molecule conjugate of any one of claims 34-40, and a pharmaceutically acceptable excipient.

42. The pharmaceutical composition of claim 41, wherein the pharmaceutical composition is formulated as a nanoparticle formulation.

43. The pharmaceutical composition of any one of claim 41 or claim 42, wherein the pharmaceutical composition is formulated for parenteral, oral, intranasal, buccal, rectal, transdermal, intravenous, subcutaneous, or intrathecal administration.

44. A method of modulating an mRNA expression of Angiopoietin-like protein 3 (ANGPTL3) gene in a subject, comprising: administering to the subject a polynucleic acid molecule of any one of claims 1-33 or a polynucleic acid molecule conjugate of any one of claims 34-40, or a pharmaceutical composition of any one of claims 41-43, thereby modulating the mRNA expression of ANGPTL3 gene in the subject.

45. A method of preventing, alleviating, or treating ANGPTL3-associated disease or symptom thereof in a subject in need thereof, comprising: administering to the subject a polynucleic acid molecule of any one of claims 1-33 or a polynucleic acid molecule conjugate of any one of claims 34-40, or a pharmaceutical composition of any one of claims 41-43, thereby preventing, alleviating, or treating ANGPTL3-associated disease or symptom thereof in the subject.

46. The method of claim 45, wherein the ANGPTL3-associated disease or symptom thereof comprises hyperlipidermia.

47. The method of claim 45, wherein the ANGPTL3-associated disease or symptom thereof comprises atherosclerosis, coronary heart disease, or vascular disease.

The application's sequence listing, which the Patent Office published only in electronic form, follows.

SEQUENCE LISTING (891 sequences)

SEQ ID NO: 1 - RNA, 23 nt, synthetic construct
  source 1..23: mol_type = other RNA
tgcttaattgtgaacatttttat

SEQ ID NO: 2 - RNA, 23 nt, synthetic construct
  source 1..23: mol_type = other RNA
tggagcttaattgtgaacatttt

SEQ ID NO: 3 - RNA, 23 nt, synthetic construct
  source 1..23: mol_type = other RNA
taaggagcttaattgtgaacatt

SEQ ID NO: 4 - RNA, 23 nt, synthetic construct
  source 1..23: mol_type = other RNA
taagaaggagcttaattgtgaac

SEQ ID NO: 5 - RNA, 23 nt, synthetic construct
  source 1..23: mol_type = other RNA
ttaaaaagaaggagcttaattgt

SEQ ID NO: 6 - RNA, 23 nt, synthetic construct
  source 1..23: mol_type = other RNA
tataaaaagaaggagcttaattg

SEQ ID NO: 7 - RNA, 23 nt, synthetic construct
  source 1..23: mol_type = other RNA
ttaactagaggaacaataaaaag

SEQ ID NO: 8 - RNA, 23 nt, synthetic construct
  source 1..23: mol_type = other RNA
tataactagaggaacaataaaaa

SEQ ID NO: 9 - RNA, 23 nt, synthetic construct
  source 1..23: mol_type = other RNA
tggaaataactagaggaacaata

SEQ ID NO: 10 - RNA, 23 nt, synthetic construct
  source 1..23: mol_type = other RNA
tctaacatagcaaatcttgattt

SEQ ID NO: 11 - RNA, 23 nt, synthetic construct
  source 1..23: mol_type = other RNA
tgtctaacatagcaaatcttgat

SEQ ID NO: 12 - RNA, 23 nt, synthetic construct
  source 1..23: mol_type = other RNA
tcgtctaacatagcaaatcttga

SEQ ID NO: 13 - RNA, 23 nt, synthetic construct
  source 1..23: mol_type = other RNA
ttcgtctaacatagcaaatcttg

SEQ ID NO: 14 - RNA, 23 nt, synthetic construct
  source 1..23: mol_type = other RNA
tatcgtctaacatagcaaatctt

SEQ ID NO: 15 - RNA, 23 nt, synthetic construct
  source 1..23: mol_type = other RNA
tcatcgtctaacatagcaaatct

SEQ ID NO: 16 - RNA, 23 nt, synthetic construct
  source 1..23: mol_type = other RNA
tacatcgtctaacatagcaaatc

SEQ ID NO: 17 - RNA, 23 nt, synthetic construct
  source 1..23: mol_type = other RNA
ttacatcgtctaacatagcaaat

SEQ ID NO: 18 - RNA, 23 nt, synthetic construct
  source 1..23: mol_type = other RNA
ttttacatcgtctaacatagcaa

SEQ ID NO: 19 - RNA, 23 nt, synthetic construct
  source 1..23: mol_type = other RNA
tttttacatcgtctaacatagca

SEQ ID NO: 20 - RNA, 23 nt, synthetic construct
  source 1..23: mol_type = other RNA
ttttttacatcgtctaacatagc

SEQ ID NO: 21 - RNA, 23 nt, synthetic construct
  source 1..23: mol_type = other RNA
taatttttacatcgtctaacata

SEQ ID NO: 22 - RNA, 23 nt, synthetic construct
  source 1..23: mol_type = other RNA
taaaatttttacatcgtctaaca

SEQ ID NO: 23 - RNA, 23 nt, synthetic construct
  source 1..23: mol_type = other RNA
tgaggccattggctaaaattttt

SEQ ID NO: 24 - RNA, 23 nt, synthetic construct
  source 1..23: mol_type = other RNA
tggaggccattggctaaaatttt

SEQ ID NO: 25 - RNA, 23 nt, synthetic construct
  source 1..23: mol_type = other RNA
ttgaaggaggccattggctaaaa

SEQ ID NO: 26 - RNA, 23 nt, synthetic construct
  source 1..23: mol_type = other RNA
tcaactgaaggaggccattggct

SEQ ID NO: 27 - RNA, 23 nt, synthetic construct
  source 1..23: mol_type = other RNA
tccaactgaaggaggccattggc

SEQ ID NO: 28 - RNA, 23 nt, synthetic construct
  source 1..23: mol_type = other RNA
tcccaactgaaggaggccattgg

SEQ ID NO: 29 - RNA, 23 nt, synthetic construct
  source 1..23: mol_type = other RNA
tccatgtcccaactgaaggaggc

SEQ ID NO: 30 - RNA, 23 nt, synthetic construct
  source 1..23: mol_type = other RNA
tagaccatgtcccaactgaagga

SEQ ID NO: 31 - RNA, 23 nt, synthetic construct
  source 1..23: mol_type = other RNA
ttttaagaccatgtcccaactga

SEQ ID NO: 32 - RNA, 23 nt, synthetic construct
  source 1..23: mol_type = other RNA
ttctttaagaccatgtcccaact

SEQ ID NO: 33 - RNA, 23 nt, synthetic construct
  source 1..23: mol_type = other RNA
tagtctttaagaccatgtcccaa

SEQ ID NO: 34 - RNA, 23 nt, synthetic construct
  source 1..23: mol_type = other RNA
taagtctttaagaccatgtccca

SEQ ID NO: 35 - RNA, 23 nt, synthetic construct
  source 1..23: mol_type = other RNA
taaagtctttaagaccatgtccc

SEQ ID NO: 36 - RNA, 23 nt, synthetic construct
  source 1..23: mol_type = other RNA
tcaaagtctttaagaccatgtcc

SEQ ID NO: 37 - RNA, 23 nt, synthetic construct
  source 1..23: mol_type = other RNA
tacaaagtctttaagaccatgtc

SEQ ID NO: 38 - RNA, 23 nt, synthetic construct
  source 1..23: mol_type = other RNA
tcttatggacaaagtctttaaga

SEQ ID NO: 39 - RNA, 23 nt, synthetic construct
  source 1..23: mol_type = other RNA
ttcattaatttggcccttcgtct

SEQ ID NO: 40 - RNA, 23 nt, synthetic construct
  source 1..23: mol_type = other RNA
tactgatcaaatatgttgagttt

SEQ ID NO: 41 - RNA, 23 nt, synthetic construct
  source 1..23: mol_type = other RNA
taaaagactgatcaaatatgttg

SEQ ID NO: 42 - RNA, 23 nt, synthetic construct
  source 1..23: mol_type = other RNA
tagatcataaaaagactgatcaa

SEQ ID NO: 43 - RNA, 23 nt, synthetic construct
  source 1..23: mol_type = other RNA
ttagatcataaaaagactgatca

SEQ ID NO: 44 - RNA, 23 nt, synthetic construct
  source 1..23: mol_type = other RNA
tttgacttgtagtttatatgtag

SEQ ID NO: 45 - RNA, 23 nt, synthetic construct
  source 1..23: mol_type = other RNA
ttttgagttgagttcaagtgaca

SEQ ID NO: 46 - RNA, 23 nt, synthetic construct
  source 1..23: mol_type = other RNA
ttaggaggctttcaagttttgag

SEQ ID NO: 47 - RNA, 23 nt, synthetic construct
  source 1..23: mol_type = other RNA
tagttgctcttctaaatatttca

SEQ ID NO: 48 - RNA, 23 nt, synthetic construct
  source 1..23: mol_type = other RNA
tagttagttagttgctcttctaa

SEQ ID NO: 49 - RNA, 23 nt, synthetic construct
  source 1..23: mol_type = other RNA
ttaagttagttagttgctcttct

SEQ ID NO: 50 - RNA, 23 nt, synthetic construct
  source 1..23: mol_type = other RNA
tttaagttagttagttgctcttc

SEQ ID NO: 51 - RNA, 23 nt, synthetic construct
  source 1..23: mol_type = other RNA
tattaagttagttagttgctctt

SEQ ID NO: 52 - RNA, 23 nt, synthetic construct
  source 1..23: mol_type = other RNA
tgttgattttgaattaagttagt

SEQ ID NO: 53 - RNA, 23 nt, synthetic construct
  source 1..23: mol_type = other RNA
taagtgaagttacttctgggtgt

SEQ ID NO: 54 - RNA, 23 nt, synthetic construct
  source 1..23: mol_type = other RNA
ttaagtgaagttacttctgggtg

SEQ ID NO: 55 - RNA, 23 nt, synthetic construct
  source 1..23: mol_type = other RNA
tgatgctattatcttgtttttct

SEQ ID NO: 56 - RNA, 23 nt, synthetic construct
  source 1..23: mol_type = other RNA
tttgatgctattatcttgttttt

SEQ ID NO: 57 - RNA, 23 nt, synthetic construct
  source 1..23: mol_type = other RNA
tggtctttgatgctattatcttg

SEQ ID NO: 58 - RNA, 23 nt, synthetic construct
  source 1..23: mol_type = other RNA
taaggtctttgatgctattatct

SEQ ID NO: 59 - RNA, 23 nt, synthetic construct
  source 1..23: mol_type = other RNA
tctatgctgttggtttaattgtt

SEQ ID NO: 60 - RNA, 23 nt, synthetic construct
  source 1..23: mol_type = other RNA
tatttgactatgctgttggttta

SEQ ID NO: 61 - RNA, 23 nt, synthetic construct
  source 1..23: mol_type = other RNA
tagttcttggtgctcttggcttg

SEQ ID NO: 62 - RNA, 23 nt, synthetic construct
  source 1..23: mol_type = other RNA
tttgagagttgctgggtctgatg

SEQ ID NO: 63 - RNA, 23 nt, synthetic construct
  source 1..23: mol_type = other RNA
tcttgagagttgctgggtctgat

SEQ ID NO: 64 - RNA, 23 nt, synthetic construct
  source 1..23: mol_type = other RNA
tacttgagagttgctgggtctga

SEQ ID NO: 65 - RNA, 23 nt, synthetic construct
  source 1..23: mol_type = other RNA
ttgaaaaacttgagagttgctgg

SEQ ID NO: 66 - RNA, 23 nt, synthetic construct
  source 1..23: mol_type = other RNA
tccatggactacctgatataaca

SEQ ID NO: 67 - RNA, 23 nt, synthetic construct
  source 1..23: mol_type = other RNA
ttgtccatggactacctgatata

SEQ ID NO: 68 - RNA, 23 nt, synthetic construct
  source 1..23: mol_type = other RNA
tatgtccatggactacctgatat

SEQ ID NO: 69 - RNA, 23 nt, synthetic construct
  source 1..23: mol_type = other RNA
taatgtccatggactacctgata

SEQ ID NO: 70 - RNA, 23 nt, synthetic construct
  source 1..23: mol_type = other RNA
ttgaattaatgtccatggactac

SEQ ID NO: 71 - RNA, 23 nt, synthetic construct
  source 1..23: mol_type = other RNA
tttgaattaatgtccatggacta

SEQ ID NO: 72 - RNA, 23 nt, synthetic construct
  source 1..23: mol_type = other RNA
tgttgaattaatgtccatggact

SEQ ID NO: 73 - RNA, 23 nt, synthetic construct
  source 1..23: mol_type = other RNA
ttcgatgttgaattaatgtccat

SEQ ID NO: 74 - RNA, 23 nt, synthetic construct
  source 1..23: mol_type = other RNA
tattcgatgttgaattaatgtcc

SEQ ID NO: 75 - RNA, 23 nt, synthetic construct
  source 1..23: mol_type = other RNA
ttattcgatgttgaattaatgtc

SEQ ID NO: 76 - RNA, 23 nt, synthetic construct
  source 1..23: mol_type = other RNA
ttctattcgatgttgaattaatg

SEQ ID NO: 77 - RNA, 23 nt, synthetic construct
  source 1..23: mol_type = other RNA
tatctattcgatgttgaattaat

SEQ ID NO: 78 - RNA, 23 nt, synthetic construct
  source 1..23: mol_type = other RNA
tcatctattcgatgttgaattaa

SEQ ID NO: 79 - RNA, 23 nt, synthetic construct
  source 1..23: mol_type = other RNA
tatccatctattcgatgttgaat

SEQ ID NO: 80 - RNA, 23 nt, synthetic construct
  source 1..23: mol_type = other RNA
tgatccatctattcgatgttgaa

SEQ ID NO: 81 - RNA, 23 nt, synthetic construct
  source 1..23: mol_type = other RNA
ttgatccatctattcgatgttga

SEQ ID NO: 82 - RNA, 23 nt, synthetic construct
  source 1..23: mol_type = other RNA
tgtgatccatctattcgatgttg

SEQ ID NO: 83 - RNA, 23 nt, synthetic construct
  source 1..23: mol_type = other RNA
ttttgtgatccatctattcgatg

SEQ ID NO: 84 - RNA, 23 nt, synthetic construct
  source 1..23: mol_type = other RNA
taagttttgtgatccatctattc

SEQ ID NO: 85 - RNA, 23 nt, synthetic construct
  source 1..23: mol_type = other RNA
tttgaagttttgtgatccatcta

SEQ ID NO: 86 - RNA, 23 nt, synthetic construct
  source 1..23: mol_type = other RNA
tacgtttcattgaagttttgtga

SEQ ID NO: 87 - RNA, 23 nt, synthetic construct
  source 1..23: mol_type = other RNA
tccacgtttcattgaagttttgt

SEQ ID NO: 88 - RNA, 23 nt, synthetic construct
  source 1..23: mol_type = other RNA
tcccacgtttcattgaagttttg

SEQ ID NO: 89 - RNA, 23 nt, synthetic construct
  source 1..23: mol_type = other RNA
ttctcccacgtttcattgaagtt

SEQ ID NO: 90 - RNA, 23 nt, synthetic construct
  source 1..23: mol_type = other RNA
tttctcccacgtttcattgaagt

SEQ ID NO: 91 - RNA, 23 nt, synthetic construct
  source 1..23: mol_type = other RNA
tgttctcccacgtttcattgaag

SEQ ID NO: 92 - RNA, 23 nt, synthetic construct
  source 1..23: mol_type = other RNA
ttagttctcccacgtttcattga

SEQ ID NO: 93 - RNA, 23 nt, synthetic construct
  source 1..23: mol_type = other RNA
tgtagttctcccacgtttcattg

SEQ ID NO: 94 - RNA, 23 nt, synthetic construct
  source 1..23: mol_type = other RNA
tttgtagttctcccacgtttcat

SEQ ID NO: 95 - RNA, 23 nt, synthetic construct
  source 1..23: mol_type = other RNA
ttttgtagttctcccacgtttca

SEQ ID NO: 96 - RNA, 23 nt, synthetic construct
  source 1..23: mol_type = other RNA
tccatatttgtagttctcccacg

SEQ ID NO: 97 - RNA, 23 nt, synthetic construct
  source 1..23: mol_type = other RNA
tattctccatcaagcctcccaaa

SEQ ID NO: 98 - RNA, 23 nt, synthetic construct
  source 1..23: mol_type = other RNA
taattctccatcaagcctcccaa

SEQ ID NO: 99 - RNA, 23 nt, synthetic construct
  source 1..23: mol_type = other RNA
tagtatatcttctctaggcccaa

SEQ ID NO: 100 - RNA, 23 nt, synthetic construct
  source 1..23: mol_type = other RNA
tggagtatatcttctctaggccc

SEQ ID NO: 101 - RNA, 23 nt, synthetic construct
  source 1..23: mol_type = other RNA
tctatggagtatatcttctctag

SEQ ID NO: 102 - RNA, 23 nt, synthetic construct
  source 1..23: mol_type = other RNA
tactatggagtatatcttctcta

SEQ ID NO: 103 - RNA, 23 nt, synthetic construct
  source 1..23: mol_type = other RNA
tcactatggagtatatcttctct

SEQ ID NO: 104 - RNA, 23 nt, synthetic construct
  source 1..23: mol_type = other RNA
ttcactatggagtatatcttctc

SEQ ID NO: 105 - RNA, 23 nt, synthetic construct
  source 1..23: mol_type = other RNA
tttcactatggagtatatcttct

SEQ ID NO: 106 - RNA, 23 nt, synthetic construct
  source 1..23: mol_type = other RNA
tttgcttcactatggagtatatc

SEQ ID NO: 107 - RNA, 23 nt, synthetic construct
  source 1..23: mol_type = other RNA
tattgcttcactatggagtatat

SEQ ID NO: 108 - RNA, 23 nt, synthetic construct
  source 1..23: mol_type = other RNA
tattagattgcttcactatggag

SEQ ID NO: 109 - RNA, 23 nt, synthetic construct
  source 1..23: mol_type = other RNA
ttaattagattgcttcactatgg

SEQ ID NO: 110 - RNA, 23 nt, synthetic construct
  source 1..23: mol_type = other RNA
ttcgtgatttcccaagtaaaaag

SEQ ID NO: 111 - RNA, 23 nt, synthetic construct
  source 1..23: mol_type = other RNA
tttggtttcgtgatttcccaagt

SEQ ID NO: 112 - RNA, 23 nt, synthetic construct
  source 1..23: mol_type = other RNA
tagttggtttcgtgatttcccaa

SEQ ID NO: 113 - RNA, 23 nt, synthetic construct
  source 1..23: mol_type = other RNA
ttagttggtttcgtgatttccca

SEQ ID NO: 114 - RNA, 23 nt, synthetic construct
  source 1..23: mol_type = other RNA
ttatagttggtttcgtgatttcc

SEQ ID NO: 115 - RNA, 23 nt, synthetic construct
  source 1..23: mol_type = other RNA
tgtatagttggtttcgtgatttc

SEQ ID NO: 116 - RNA, 23 nt, synthetic construct
  source 1..23: mol_type = other RNA
tcgtatagttggtttcgtgattt

SEQ ID NO: 117 - RNA, 23 nt, synthetic construct
  source 1..23: mol_type = other RNA
tgcgtatagttggtttcgtgatt

SEQ ID NO: 118 - RNA, 23 nt, synthetic construct
  source 1..23: mol_type = other RNA
tagcgtatagttggtttcgtgat

SEQ ID NO: 119 - RNA, 23 nt, synthetic construct
  source 1..23: mol_type = other RNA
ttgtagcgtatagttggtttcgt

SEQ ID NO: 120 - RNA, 23 nt, synthetic construct
  source 1..23: mol_type = other RNA
tggacattgccagtaatcgcaac

SEQ ID NO: 121 - RNA, 23 nt, synthetic construct
  source 1..23: mol_type = other RNA
tgggacattgccagtaatcgcaa

SEQ ID NO: 122 - RNA, 23 nt, synthetic construct
  source 1..23: mol_type = other RNA
tggggacattgccagtaatcgca

SEQ ID NO: 123 - RNA, 23 nt, synthetic construct
  source 1..23: mol_type = other RNA
ttggggacattgccagtaatcgc

SEQ ID NO: 124 - RNA, 23 nt, synthetic construct
  source 1..23: mol_type = other RNA
tattggggacattgccagtaatc

SEQ ID NO: 125 - RNA, 23 nt, synthetic construct
  source 1..23: mol_type = other RNA
tgattgcattggggacattgcca

SEQ ID NO: 126 - RNA, 23 nt, synthetic construct
  source 1..23: mol_type = other RNA
tggattgcattggggacattgcc

SEQ ID NO: 127 - RNA, 23 nt, synthetic construct
  source 1..23: mol_type = other RNA
tcgggattgcattggggacattg

SEQ ID NO: 128 - RNA, 23 nt, synthetic construct
  source 1..23: mol_type = other RNA
ttttccgggattgcattggggac

SEQ ID NO: 129 - RNA, 23 nt, synthetic construct
  source 1..23: mol_type = other RNA
ttgttttccgggattgcattggg

SEQ ID NO: 130 - RNA, 23 nt, synthetic construct
  source 1..23: mol_type = other RNA
tttgttttccgggattgcattgg

SEQ ID NO: 131 - RNA, 23 nt, synthetic construct
  source 1..23: mol_type = other RNA
ttttgttttccgggattgcattg

SEQ ID NO: 132 - RNA, 23 nt, synthetic construct
  source 1..23: mol_type = other RNA
tctttgttttccgggattgcatt

SEQ ID NO: 133 - RNA, 23 nt, synthetic construct
  source 1..23: mol_type = other RNA
ttctttgttttccgggattgcat

SEQ ID NO: 134 - RNA, 23 nt, synthetic construct
  source 1..23: mol_type = other RNA
tatctttgttttccgggattgca

SEQ ID NO: 135 - RNA, 23 nt, synthetic construct
  source 1..23: mol_type = other RNA
tcaagtagaaaacaccaaatctt

SEQ ID NO: 136 - RNA, 23 nt, synthetic construct
  source 1..23: mol_type = other RNA
tccaagtagaaaacaccaaatct

SEQ ID NO: 137 - RNA, 23 nt, synthetic construct
  source 1..23: mol_type = other RNA
tcccaagtagaaaacaccaaatc

SEQ ID NO: 138 - RNA, 23 nt, synthetic construct
  source 1..23: mol_type = other RNA
tgtgatcccaagtagaaaacacc

SEQ ID NO: 139 - RNA, 23 nt, synthetic construct
  source 1..23: mol_type = other RNA
ttttgtgatcccaagtagaaaac

SEQ ID NO: 140 - RNA, 23 nt, synthetic construct
  source 1..23: mol_type = other RNA
tctttgtgatcccaagtagaaaa

SEQ ID NO: 141 - RNA, 23 nt, synthetic construct
  source 1..23: mol_type = other RNA
ttgctttgtgatcccaagtagaa

SEQ ID NO: 142 - RNA, 23 nt, synthetic construct
  source 1..23: mol_type = other RNA
tttgctttgtgatcccaagtaga

SEQ ID NO: 143 - RNA, 23 nt, synthetic construct
  source 1..23: mol_type = other RNA
tggtttgttatatttaccattta

SEQ ID NO: 144 - RNA, 23 nt, synthetic construct
  source 1..23: mol_type = other RNA
taccttccattttgagacttcca

SEQ ID NO: 145 - RNA, 23 nt, synthetic construct
  source 1..23: mol_type = other RNA
tagagtataaccttccattttga

SEQ ID NO: 146 - RNA, 23 nt, synthetic construct
  source 1..23: mol_type = other RNA
ttagagtataaccttccattttg

SEQ ID NO: 147 - RNA, 23 nt, synthetic construct
  source 1..23: mol_type = other RNA
tatagagtataaccttccatttt

SEQ ID NO: 148 - RNA, 23 nt, synthetic construct
  source 1..23: mol_type = other RNA
tttttatagagtataaccttcca

SEQ ID NO: 149 - RNA, 23 nt, synthetic construct
  source 1..23: mol_type = other RNA
tgattttatagagtataaccttc

SEQ ID NO: 150 - RNA, 23 nt, synthetic construct
  source 1..23: mol_type = other RNA
tgatcaacattttggttgatttt

SEQ ID NO: 151 - RNA, 23 nt, synthetic construct
  source 1..23: mol_type = other RNA
tggatcaacattttggttgattt

SEQ ID NO: 152 - RNA, 23 nt, synthetic construct
  source 1..23: mol_type = other RNA
ttggatcaacattttggttgatt

SEQ ID NO: 153 - RNA, 23 nt, synthetic construct
  source 1..23: mol_type = other RNA
tatggatcaacattttggttgat

SEQ ID NO: 154 - RNA, 23 nt, synthetic construct
  source 1..23: mol_type = other RNA
tggatggatcaacattttggttg

SEQ ID NO: 155 - RNA, 23 nt, synthetic construct
  source 1..23: mol_type = other RNA
ttggatggatcaacattttggtt

SEQ ID NO: 156 - RNA, 23 nt, synthetic construct
  source 1..23: mol_type = other RNA
tcattaacttggaatgaggttaa

SEQ ID NO: 157 - RNA, 23 nt, synthetic construct
  source 1..23: mol_type = other RNA
taggatttaataccagattatta

SEQ ID NO: 158 - RNA, 23 nt, synthetic construct
  source 1..23: mol_type = other RNA
ttaaggatttaataccagattat

SEQ ID NO: 159 - RNA, 23 nt, synthetic construct
  source 1..23: mol_type = other RNA
tcttaaggatttaataccagatt

SEQ ID NO: 160 - RNA, 23 nt, synthetic construct
  source 1..23: mol_type = other RNA
tttgtatgtttaatcttaaatag

SEQ ID NO: 161 - RNA, 23 nt, synthetic construct
  source 1..23: mol_type = other RNA
ttgattgtatgtttaatcttaaa

SEQ ID NO: 162 - RNA, 23 nt, synthetic construct
  source 1..23: mol_type = other RNA
ttattctttaaggttatgtgatt

SEQ ID NO: 163 - RNA, 23 nt, synthetic construct
  source 1..23: mol_type = other RNA
taaattgattcccacatcacaaa

SEQ ID NO: 164 - RNA, 23 nt, synthetic construct
  source 1..23: mol_type = other RNA
taccatctaaaattgattcccac

SEQ ID NO: 165 - RNA, 23 nt, synthetic construct
  source 1..23: mol_type = other RNA
ttattagctcatatgatgccttt

SEQ ID NO: 166 - RNA, 23 nt, synthetic construct
  source 1..23: mol_type = other RNA
tgtgatattagctcatatgatgc

SEQ ID NO: 167 - RNA, 23 nt, synthetic construct
  source 1..23: mol_type = other RNA
ttgtgatattagctcatatgatg

SEQ ID NO: 168 - RNA, 23 nt, synthetic construct
  source 1..23: mol_type = other RNA
tgtcaagtttagagttttaacaa

SEQ ID NO: 169 - RNA, 23 nt, synthetic construct
  source 1..23: mol_type = other RNA
ttagtcaagtttagagttttaac

SEQ ID NO: 170 - RNA, 23 nt, synthetic construct
  source 1..23: mol_type = other RNA
ttatttagtcaagtttagagttt

SEQ ID NO: 171 - RNA, 23 nt, synthetic construct
  source 1..23: mol_type = other RNA
tacatactctgtgctgacgattt

SEQ ID NO: 172 - RNA, 23 nt, synthetic construct
  source 1..23: mol_type = other RNA
tgtcaatgtgacttagtagtcat

SEQ ID NO: 173 - RNA, 23 nt, synthetic construct
  source 1..23: mol_type = other RNA
tggtatagtgatacctcatgtta

SEQ ID NO: 174 - RNA, 23 nt, synthetic construct
  source 1..23: mol_type = other RNA
ttaaactttaactcgatgccaca

SEQ ID NO: 175 - RNA, 23 nt, synthetic construct
  source 1..23: mol_type = other RNA
tataaactttaactcgatgccac

SEQ ID NO: 176 - RNA, 23 nt, synthetic construct
  source 1..23: mol_type = other RNA
ttaggggaaatataaactttaac

SEQ ID NO: 177 - RNA, 23 nt, synthetic construct
  source 1..23: mol_type = other RNA
tcctttaacaaatgggtttaatt

SEQ ID NO: 178 - RNA, 23 nt, synthetic construct
  source 1..23: mol_type = other RNA
tcactatatcctttaacaaatgg

SEQ ID NO: 179 - RNA, 23 nt, synthetic construct
  source 1..23: mol_type = other RNA
tgcactatatcctttaacaaatg

SEQ ID NO: 180 - RNA, 23 nt, synthetic construct
  source 1..23: mol_type = other RNA
tgggcactatatcctttaacaaa

SEQ ID NO: 181 - RNA, 23 nt, synthetic construct
  source 1..23: mol_type = other RNA
ttgggcactatatcctttaacaa

SEQ ID NO: 182 - RNA, 23 nt, synthetic construct
  source 1..23: mol_type = other RNA
taacttgggcactatatccttta

SEQ ID NO: 183 - RNA, 23 nt, synthetic construct
  source 1..23: mol_type = other RNA
ttaacttgggcactatatccttt

SEQ ID NO: 184 - RNA, 23 nt, synthetic construct
  source 1..23: mol_type = other RNA
tataacttgggcactatatcctt

SEQ ID NO: 185 - RNA, 23 nt, synthetic construct
  source 1..23: mol_type = other RNA
ttataacttgggcactatatcct

SEQ ID NO: 186 - RNA, 23 nt, synthetic construct
  source 1..23: mol_type = other RNA
ttgacaaaggtaggtcaccatat

SEQ ID NO: 187 - RNA, 23 nt, synthetic construct
  source 1..23: mol_type = other RNA
tttgacaaaggtaggtcaccata

SEQ ID NO: 188 - RNA, 23 nt, synthetic construct
  source 1..23: mol_type = other RNA
tattgacaaaggtaggtcaccat

SEQ ID NO: 189 - RNA, 23 nt, synthetic construct
  source 1..23: mol_type = other RNA
tgacatgtatattggataatttg

SEQ ID NO: 190 - RNA, 23 nt, synthetic construct
  source 1..23: mol_type = other RNA
ttagtctgtggtcctgaaaatta

SEQ ID NO: 191 - RNA, 23 nt, synthetic construct
  source 1..23: mol_type = other RNA
tgcttagtctgtggtcctgaaaa

SEQ ID NO: 192 - RNA, 23 nt, synthetic construct
  source 1..23: mol_type = other RNA
tacagcttagtctgtggtcctga

SEQ ID NO: 193 - RNA, 23 nt, synthetic construct
  source 1..23: mol_type = other RNA
tgtattctggccctaaaaaaatc

SEQ ID NO: 194 - RNA, 23 nt, synthetic construct
  source 1..23: mol_type = other RNA
tttggtattctggccctaaaaaa

SEQ ID NO: 195 - RNA, 23 nt, synthetic construct
  source 1..23: mol_type = other RNA
ttttggtattctggccctaaaaa

SEQ ID NO: 196 - RNA, 23 nt, synthetic construct
  source 1..23: mol_type = other RNA
tgaagcaactcatatattaaata

SEQ ID NO: 197-200 - skipped (4 entries)

SEQ ID NO: 201 - RNA, 23 nt, synthetic construct
  source 1..23: mol_type = other RNA
  modified_base 1: mod_base = OTHER; note = 2'-O-Methyl ribonucleotide
  modified_base 2: mod_base = OTHER; note = 2'-fluoro ribonucleotide
  modified_base 3..6: mod_base = OTHER; note = 2'-O-Methyl ribonucleotide
  modified_base 7: mod_base = OTHER; note = 2'-fluoro ribonucleotide
  modified_base 8..11: mod_base = OTHER; note = 2'-O-Methyl ribonucleotide
  modified_base 12: mod_base = OTHER; note = 2'-fluoro ribonucleotide
  modified_base 13: mod_base = OTHER; note = 2'-O-Methyl ribonucleotide
  modified_base 14: mod_base = OTHER; note = 2'-fluoro ribonucleotide
  modified_base 15: mod_base = OTHER; note = 2'-O-Methyl ribonucleotide
  modified_base 16: mod_base = OTHER; note = 2'-fluoro ribonucleotide
  modified_base 17..23: mod_base = OTHER; note = 2'-O-Methyl ribonucleotide
  modified_base 1..3: mod_base = OTHER; note = phosphorothioate linkage
  modified_base 21..23: mod_base = OTHER; note = phosphorothioate linkage
tgcttaattgtgaacatttttat

SEQ ID NO: 202 - RNA, 23 nt, synthetic construct
  source 1..23: mol_type = other RNA
  modified_base 1: mod_base = OTHER; note = 2'-O-Methyl ribonucleotide
  modified_base 2: mod_base = OTHER; note = 2'-fluoro ribonucleotide
  modified_base 3..6: mod_base = OTHER; note = 2'-O-Methyl ribonucleotide
  modified_base 7: mod_base = OTHER; note = 2'-fluoro ribonucleotide
  modified_base 8..11: mod_base = OTHER; note = 2'-O-Methyl ribonucleotide
  modified_base 12: mod_base = OTHER; note = 2'-fluoro ribonucleotide
  modified_base 13: mod_base = OTHER; note = 2'-O-Methyl ribonucleotide
  modified_base 14: mod_base = OTHER; note = 2'-fluoro ribonucleotide
  modified_base 15: mod_base = OTHER; note = 2'-O-Methyl ribonucleotide
  modified_base 16: mod_base = OTHER; note = 2'-fluoro ribonucleotide
  modified_base 17..23: mod_base = OTHER; note = 2'-O-Methyl ribonucleotide
  modified_base 1..3: mod_base = OTHER; note = phosphorothioate linkage
  modified_base 21..23: mod_base = OTHER; note = phosphorothioate linkage
tggagcttaattgtgaacatttt

SEQ ID NO: 203 - RNA, 23 nt, synthetic construct
  source 1..23: mol_type = other RNA
  modified_base 1: mod_base = OTHER; note = 2'-O-Methyl ribonucleotide
  modified_base 2: mod_base = OTHER; note = 2'-fluoro ribonucleotide
  modified_base 3..6: mod_base = OTHER; note = 2'-O-Methyl ribonucleotide
  modified_base 7: mod_base = OTHER; note = 2'-fluoro ribonucleotide
  modified_base 8..11: mod_base = OTHER; note = 2'-O-Methyl ribonucleotide
  modified_base 12: mod_base = OTHER; note = 2'-fluoro ribonucleotide
  modified_base 13: mod_base = OTHER; note = 2'-O-Methyl ribonucleotide
  modified_base 14: mod_base = OTHER; note = 2'-fluoro ribonucleotide
  modified_base 15: mod_base = OTHER; note = 2'-O-Methyl ribonucleotide
  modified_base 16: mod_base = OTHER; note = 2'-fluoro ribonucleotide
  modified_base 17..23: mod_base = OTHER; note = 2'-O-Methyl ribonucleotide
  modified_base 1..3: mod_base = OTHER; note = phosphorothioate linkage
  modified_base 21..23: mod_base = OTHER; note = phosphorothioate linkage
taaggagcttaattgtgaacatt

SEQ ID NO: 204 - RNA, 23 nt, synthetic construct
  source 1..23: mol_type = other RNA
  modified_base 1: mod_base = OTHER; note = 2'-O-Methyl ribonucleotide
  modified_base 2: mod_base = OTHER; note = 2'-fluoro ribonucleotide
  modified_base 3..6: mod_base = OTHER; note = 2'-O-Methyl ribonucleotide
  modified_base 7: mod_base = OTHER; note = 2'-fluoro ribonucleotide
  modified_base 8..11: mod_base = OTHER; note = 2'-O-Methyl ribonucleotide
  modified_base 12: mod_base = OTHER; note = 2'-fluoro ribonucleotide
  modified_base 13: mod_base = OTHER; note = 2'-O-Methyl ribonucleotide
  modified_base 14: mod_base = OTHER; note = 2'-fluoro ribonucleotide
  modified_base 15: mod_base = OTHER; note = 2'-O-Methyl ribonucleotide
  modified_base 16: mod_base = OTHER; note = 2'-fluoro ribonucleotide
  modified_base 17..23: mod_base = OTHER; note = 2'-O-Methyl ribonucleotide
  modified_base 1..3: mod_base = OTHER; note = phosphorothioate linkage
  modified_base 21..23: mod_base = OTHER; note = phosphorothioate linkage
taagaaggagcttaattgtgaac

SEQ ID NO: 205 - RNA, 23 nt, synthetic construct
  source 1..23: mol_type = other RNA
  modified_base 1: mod_base = OTHER; note = 2'-O-Methyl ribonucleotide
  modified_base 2: mod_base = OTHER; note = 2'-fluoro ribonucleotide
  modified_base 3..6: mod_base = OTHER; note = 2'-O-Methyl ribonucleotide
  modified_base 7: mod_base = OTHER; note = 2'-fluoro ribonucleotide
  modified_base 8..11: mod_base = OTHER; note = 2'-O-Methyl ribonucleotide
  modified_base 12: mod_base = OTHER; note = 2'-fluoro ribonucleotide
  modified_base 13: mod_base = OTHER; note = 2'-O-Methyl ribonucleotide
  modified_base 14: mod_base = OTHER; note = 2'-fluoro ribonucleotide
  modified_base 15: mod_base = OTHER; note = 2'-O-Methyl ribonucleotide
  modified_base 16: mod_base = OTHER; note = 2'-fluoro ribonucleotide
  modified_base 17..23: mod_base = OTHER; note = 2'-O-Methyl ribonucleotide
  modified_base 1..3: mod_base = OTHER; note = phosphorothioate linkage
  modified_base 21..23: mod_base = OTHER; note = phosphorothioate linkage
ttaaaaagaaggagcttaattgt

SEQ ID NO: 206 - RNA, 23 nt, synthetic construct
  source 1..23: mol_type = other RNA
  modified_base 1: mod_base = OTHER; note = 2'-O-Methyl ribonucleotide
  modified_base 2: mod_base = OTHER; note = 2'-fluoro ribonucleotide
  modified_base 3..6: mod_base = OTHER; note = 2'-O-Methyl ribonucleotide
  modified_base 7: mod_base = OTHER; note = 2'-fluoro ribonucleotide
  modified_base 8..11: mod_base = OTHER; note = 2'-O-Methyl ribonucleotide
  modified_base 12: mod_base = OTHER; note = 2'-fluoro ribonucleotide
  modified_base 13: mod_base = OTHER; note = 2'-O-Methyl ribonucleotide
  modified_base 14: mod_base = OTHER; note = 2'-fluoro ribonucleotide
  modified_base 15: mod_base = OTHER; note = 2'-O-Methyl ribonucleotide
  modified_base 16: mod_base = OTHER; note = 2'-fluoro ribonucleotide
  modified_base 17..23: mod_base = OTHER; note = 2'-O-Methyl ribonucleotide
  modified_base 1..3: mod_base = OTHER; note = phosphorothioate linkage
  modified_base 21..23: mod_base = OTHER; note = phosphorothioate linkage
tataaaaagaaggagcttaattg

SEQ ID NO: 207 - RNA, 23 nt, synthetic construct
  source 1..23: mol_type = other RNA
  modified_base 1: mod_base = OTHER; note = 2'-O-Methyl ribonucleotide
  modified_base 2: mod_base = OTHER; note = 2'-fluoro ribonucleotide
  modified_base 3..6: mod_base = OTHER; note = 2'-O-Methyl ribonucleotide
  modified_base 7: mod_base = OTHER; note = 2'-fluoro ribonucleotide
  modified_base 8..11: mod_base = OTHER; note = 2'-O-Methyl ribonucleotide
  modified_base 12: mod_base = OTHER; note = 2'-fluoro ribonucleotide
  modified_base 13: mod_base = OTHER; note = 2'-O-Methyl ribonucleotide
  modified_base 14: mod_base = OTHER; note = 2'-fluoro ribonucleotide
  modified_base 15: mod_base = OTHER; note = 2'-O-Methyl ribonucleotide
  modified_base 16: mod_base = OTHER; note = 2'-fluoro ribonucleotide
  modified_base 17..23: mod_base = OTHER; note = 2'-O-Methyl ribonucleotide
  modified_base 1..3: mod_base = OTHER; note = phosphorothioate linkage
  modified_base 21..23: mod_base = OTHER; note = phosphorothioate linkage
ttaactagaggaacaataaaaag

SEQ ID NO: 208 - RNA, 23 nt, synthetic construct
  source 1..23: mol_type = other RNA
  modified_base 1: mod_base = OTHER; note = 2'-O-Methyl ribonucleotide
  modified_base 2: mod_base = OTHER; note = 2'-fluoro ribonucleotide
  modified_base 3..6: mod_base = OTHER; note = 2'-O-Methyl ribonucleotide
  modified_base 7: mod_base = OTHER; note = 2'-fluoro ribonucleotide
  modified_base 8..11: mod_base = OTHER; note = 2'-O-Methyl ribonucleotide
  modified_base 12: mod_base = OTHER; note = 2'-fluoro ribonucleotide
  modified_base 13: mod_base = OTHER; note = 2'-O-Methyl ribonucleotide
  modified_base 14: mod_base = OTHER; note = 2'-fluoro ribonucleotide
  modified_base 15: mod_base = OTHER; note = 2'-O-Methyl ribonucleotide
  modified_base 16: mod_base = OTHER; note = 2'-fluoro ribonucleotide
  modified_base 17..23: mod_base = OTHER; note = 2'-O-Methyl ribonucleotide
  modified_base 1..3: mod_base = OTHER; note = phosphorothioate linkage
  modified_base 21..23: mod_base = OTHER; note = phosphorothioate linkage
tataactagaggaacaataaaaa

SEQ ID NO: 209 - RNA, 23 nt, synthetic construct
  source 1..23: mol_type = other RNA
  modified_base 1: mod_base = OTHER; note = 2'-O-Methyl ribonucleotide
  modified_base 2: mod_base = OTHER; note = 2'-fluoro ribonucleotide
  modified_base 3..6: mod_base = OTHER; note = 2'-O-Methyl ribonucleotide
  modified_base 7: mod_base = OTHER; note = 2'-fluoro ribonucleotide
  modified_base 8..11: mod_base = OTHER; note = 2'-O-Methyl ribonucleotide
  modified_base 12: mod_base = OTHER; note = 2'-fluoro ribonucleotide
  modified_base 13: mod_base = OTHER; note = 2'-O-Methyl ribonucleotide
  modified_base 14: mod_base = OTHER; note = 2'-fluoro ribonucleotide
  modified_base 15: mod_base = OTHER; note = 2'-O-Methyl ribonucleotide
  modified_base 16: mod_base = OTHER; note = 2'-fluoro ribonucleotide
  modified_base 17..23: mod_base = OTHER; note = 2'-O-Methyl ribonucleotide
  modified_base 1..3: mod_base = OTHER; note = phosphorothioate linkage
  modified_base 21..23: mod_base = OTHER; note = phosphorothioate linkage
tggaaataactagaggaacaata

SEQ ID NO: 210 - RNA, 23 nt, synthetic construct
  source 1..23: mol_type = other RNA
  modified_base 1: mod_base = OTHER; note = 2'-O-Methyl ribonucleotide
  modified_base 2: mod_base = OTHER; note = 2'-fluoro ribonucleotide
  modified_base 3..6: mod_base = OTHER; note = 2'-O-Methyl ribonucleotide
  modified_base 7: mod_base = OTHER; note = 2'-fluoro ribonucleotide
  modified_base 8..11: mod_base = OTHER; note = 2'-O-Methyl ribonucleotide
  modified_base 12: mod_base = OTHER; note = 2'-fluoro ribonucleotide
  modified_base 13: mod_base = OTHER; note = 2'-O-Methyl ribonucleotide
  modified_base 14: mod_base = OTHER; note = 2'-fluoro ribonucleotide
  modified_base 15: mod_base = OTHER; note = 2'-O-Methyl ribonucleotide
  modified_base 16: mod_base = OTHER; note = 2'-fluoro ribonucleotide
  modified_base 17..23: mod_base = OTHER; note = 2'-O-Methyl ribonucleotide
  modified_base 1..3: mod_base = OTHER; note = phosphorothioate linkage
  modified_base 21..23: mod_base = OTHER; note = phosphorothioate linkage
tctaacatagcaaatcttgattt

SEQ ID NO: 211 - RNA, 23 nt, synthetic construct
  source 1..23: mol_type = other RNA
  modified_base 1: mod_base = OTHER; note = 2'-O-Methyl ribonucleotide
  modified_base 2: mod_base = OTHER; note = 2'-fluoro ribonucleotide
  modified_base 3..6: mod_base = OTHER; note = 2'-O-Methyl ribonucleotide
  modified_base 7: mod_base = OTHER; note = 2'-fluoro ribonucleotide
  modified_base 8..11: mod_base = OTHER; note = 2'-O-Methyl ribonucleotide
  modified_base 12: mod_base = OTHER; note = 2'-fluoro ribonucleotide
  modified_base 13: mod_base = OTHER; note = 2'-O-Methyl ribonucleotide
  modified_base 14: mod_base = OTHER; note = 2'-fluoro ribonucleotide
  modified_base 15: mod_base = OTHER; note = 2'-O-Methyl ribonucleotide
  modified_base 16: mod_base = OTHER; note = 2'-fluoro ribonucleotide
  modified_base 17..23: mod_base = OTHER; note = 2'-O-Methyl ribonucleotide
  modified_base 1..3: mod_base = OTHER; note = phosphorothioate linkage
  modified_base 21..23: mod_base = OTHER; note = phosphorothioate linkage
tgtctaacatagcaaatcttgat

SEQ ID NO: 212 - RNA, 23 nt, synthetic construct
  source 1..23: mol_type = other RNA
  modified_base 1: mod_base = OTHER; note = 2'-O-Methyl ribonucleotide
  modified_base 2: mod_base = OTHER; note = 2'-fluoro ribonucleotide
  modified_base 3..6: mod_base = OTHER; note = 2'-O-Methyl ribonucleotide
  modified_base 7: mod_base = OTHER; note = 2'-fluoro ribonucleotide
  modified_base 8..11: mod_base = OTHER; note = 2'-O-Methyl ribonucleotide
  modified_base 12: mod_base = OTHER; note = 2'-fluoro ribonucleotide
  modified_base 13: mod_base = OTHER; note = 2'-O-Methyl ribonucleotide
  modified_base 14: mod_base = OTHER; note = 2'-fluoro ribonucleotide
  modified_base 15: mod_base = OTHER; note = 2'-O-Methyl ribonucleotide
  modified_base 16: mod_base = OTHER; note = 2'-fluoro ribonucleotide
  modified_base 17..23: mod_base = OTHER; note = 2'-O-Methyl ribonucleotide
  modified_base 1..3: mod_base = OTHER; note = phosphorothioate linkage
  modified_base 21..23: mod_base = OTHER; note = phosphorothioate linkage
tcgtctaacatagcaaatcttga

SEQ ID NO: 213 - RNA, 23 nt, synthetic construct
  source 1..23: mol_type = other RNA
  modified_base 1: mod_base = OTHER; note = 2'-O-Methyl ribonucleotide
  modified_base 2: mod_base = OTHER; note = 2'-fluoro ribonucleotide
  modified_base 3..6: mod_base = OTHER; note = 2'-O-Methyl ribonucleotide
  modified_base 7: mod_base = OTHER; note = 2'-fluoro ribonucleotide
  modified_base 8..11: mod_base = OTHER; note = 2'-O-Methyl ribonucleotide
  modified_base 12: mod_base = OTHER; note = 2'-fluoro ribonucleotide
  modified_base 13: mod_base = OTHER; note = 2'-O-Methyl ribonucleotide
  modified_base 14: mod_base = OTHER; note = 2'-fluoro ribonucleotide
  modified_base 15: mod_base = OTHER; note = 2'-O-Methyl ribonucleotide
  modified_base 16: mod_base = OTHER; note = 2'-fluoro ribonucleotide
  modified_base 17..23: mod_base = OTHER; note = 2'-O-Methyl ribonucleotide
  modified_base 1..3: mod_base = OTHER; note = phosphorothioate linkage
  modified_base 21..23: mod_base = OTHER; note = phosphorothioate linkage
ttcgtctaacatagcaaatcttg

SEQ ID NO: 214 - RNA, 23 nt, synthetic construct
  source 1..23: mol_type = other RNA
  modified_base 1: mod_base = OTHER; note = 2'-O-Methyl ribonucleotide
  modified_base 2: mod_base = OTHER; note = 2'-fluoro ribonucleotide
  modified_base 3..6: mod_base = OTHER; note = 2'-O-Methyl ribonucleotide
  modified_base 7: mod_base = OTHER; note = 2'-fluoro ribonucleotide
  modified_base 8..11: mod_base = OTHER; note = 2'-O-Methyl ribonucleotide
  modified_base 12: mod_base = OTHER; note = 2'-fluoro ribonucleotide
  modified_base 13: mod_base = OTHER; note = 2'-O-Methyl ribonucleotide
  modified_base 14: mod_base = OTHER; note = 2'-fluoro ribonucleotide
  modified_base 15: mod_base = OTHER; note = 2'-O-Methyl ribonucleotide
  modified_base 16: mod_base = OTHER; note = 2'-fluoro ribonucleotide
  modified_base 17..23: mod_base = OTHER; note = 2'-O-Methyl ribonucleotide
  modified_base 1..3: mod_base = OTHER; note = phosphorothioate linkage
  modified_base 21..23: mod_base = OTHER; note = phosphorothioate linkage
tatcgtctaacatagcaaatctt

SEQ ID NO: 215 - RNA, 23 nt, synthetic construct
  source 1..23: mol_type = other RNA
  modified_base 1: mod_base = OTHER; note = 2'-O-Methyl ribonucleotide
  modified_base 2: mod_base = OTHER; note = 2'-fluoro ribonucleotide
  modified_base 3..6: mod_base = OTHER; note = 2'-O-Methyl ribonucleotide
  modified_base 7: mod_base = OTHER; note = 2'-fluoro ribonucleotide
  modified_base 8..11: mod_base = OTHER; note = 2'-O-Methyl ribonucleotide
  modified_base 12: mod_base = OTHER; note = 2'-fluoro ribonucleotide
  modified_base 13: mod_base = OTHER; note = 2'-O-Methyl ribonucleotide
  modified_base 14: mod_base = OTHER; note = 2'-fluoro ribonucleotide
  modified_base 15: mod_base = OTHER; note = 2'-O-Methyl ribonucleotide
  modified_base 16: mod_base = OTHER; note = 2'-fluoro ribonucleotide
  modified_base 17..23: mod_base = OTHER; note = 2'-O-Methyl ribonucleotide
  modified_base 1..3: mod_base = OTHER; note = phosphorothioate linkage
  modified_base 21..23: mod_base = OTHER; note = phosphorothioate linkage
tcatcgtctaacatagcaaatct

SEQ ID NO: 216 - RNA, 23 nt, synthetic construct
  source 1..23: mol_type = other RNA
  modified_base 1: mod_base = OTHER; note = 2'-O-Methyl ribonucleotide
  modified_base 2: mod_base = OTHER; note = 2'-fluoro ribonucleotide
  modified_base 3..6: mod_base = OTHER; note = 2'-O-Methyl ribonucleotide
  modified_base 7: mod_base = OTHER; note = 2'-fluoro ribonucleotide
  modified_base 8..11: mod_base = OTHER; note = 2'-O-Methyl ribonucleotide
  modified_base 12: mod_base = OTHER; note = 2'-fluoro ribonucleotide
  modified_base 13: mod_base = OTHER; note = 2'-O-Methyl ribonucleotide
  modified_base 14: mod_base = OTHER; note = 2'-fluoro ribonucleotide
  modified_base 15: mod_base = OTHER; note = 2'-O-Methyl ribonucleotide
  modified_base 16: mod_base = OTHER; note = 2'-fluoro ribonucleotide
  modified_base 17..23: mod_base = OTHER; note = 2'-O-Methyl ribonucleotide
  modified_base 1..3: mod_base = OTHER; note = phosphorothioate linkage
  modified_base 21..23: mod_base = OTHER; note = phosphorothioate linkage
tacatcgtctaacatagcaaatc

SEQ ID NO: 217 - RNA, 23 nt, synthetic construct
  source 1..23: mol_type = other RNA
  modified_base 1: mod_base = OTHER; note = 2'-O-Methyl ribonucleotide
  modified_base 2: mod_base = OTHER; note = 2'-fluoro ribonucleotide
  modified_base 3..6: mod_base = OTHER; note = 2'-O-Methyl ribonucleotide
  modified_base 7: mod_base = OTHER; note = 2'-fluoro ribonucleotide
  modified_base 8..11: mod_base = OTHER; note = 2'-O-Methyl ribonucleotide
  modified_base 12: mod_base = OTHER; note = 2'-fluoro ribonucleotide
  modified_base 13: mod_base = OTHER; note = 2'-O-Methyl ribonucleotide
  modified_base 14: mod_base = OTHER; note = 2'-fluoro ribonucleotide
  modified_base 15: mod_base = OTHER; note = 2'-O-Methyl ribonucleotide
  modified_base 16: mod_base = OTHER; note = 2'-fluoro ribonucleotide
  modified_base 17..23: mod_base = OTHER; note = 2'-O-Methyl ribonucleotide
  modified_base 1..3: mod_base = OTHER; note = phosphorothioate linkage
  modified_base 21..23: mod_base = OTHER; note = phosphorothioate linkage
ttacatcgtctaacatagcaaat

SEQ ID NO: 218 - RNA, 23 nt, synthetic construct
  source 1..23: mol_type = other RNA
  modified_base 1: mod_base = OTHER; note = 2'-O-Methyl ribonucleotide
  modified_base 2: mod_base = OTHER; note = 2'-fluoro ribonucleotide
  modified_base 3..6: mod_base = OTHER; note = 2'-O-Methyl ribonucleotide
  modified_base 7: mod_base = OTHER; note = 2'-fluoro ribonucleotide
  modified_base 8..11: mod_base = OTHER; note = 2'-O-Methyl ribonucleotide
  modified_base 12: mod_base = OTHER; note = 2'-fluoro ribonucleotide
  modified_base 13: mod_base = OTHER; note = 2'-O-Methyl ribonucleotide
  modified_base 14: mod_base = OTHER; note = 2'-fluoro ribonucleotide
  modified_base 15: mod_base = OTHER; note = 2'-O-Methyl ribonucleotide
  modified_base 16: mod_base = OTHER; note = 2'-fluoro ribonucleotide
  modified_base 17..23: mod_base = OTHER; note = 2'-O-Methyl ribonucleotide
  modified_base 1..3: mod_base = OTHER; note = phosphorothioate linkage
  modified_base 21..23: mod_base = OTHER; note = phosphorothioate linkage
ttttacatcgtctaacatagcaa

SEQ ID NO: 219 - RNA, 23 nt, synthetic construct
  source 1..23: mol_type = other RNA
  modified_base 1: mod_base = OTHER; note = 2'-O-Methyl ribonucleotide
  modified_base 2: mod_base = OTHER; note = 2'-fluoro ribonucleotide
  modified_base 3..6: mod_base = OTHER; note = 2'-O-Methyl ribonucleotide
  modified_base 7: mod_base = OTHER; note = 2'-fluoro ribonucleotide
  modified_base 8..11: mod_base = OTHER; note = 2'-O-Methyl ribonucleotide
  modified_base 12: mod_base = OTHER; note = 2'-fluoro ribonucleotide
  modified_base 13: mod_base = OTHER; note = 2'-O-Methyl ribonucleotide
  modified_base 14: mod_base = OTHER; note = 2'-fluoro ribonucleotide
  modified_base 15: mod_base = OTHER; note = 2'-O-Methyl ribonucleotide
  modified_base 16: mod_base = OTHER; note = 2'-fluoro ribonucleotide
  modified_base 17..23: mod_base = OTHER; note = 2'-O-Methyl ribonucleotide
  modified_base 1..3: mod_base = OTHER; note = phosphorothioate linkage
  modified_base 21..23: mod_base = OTHER; note = phosphorothioate linkage
tttttacatcgtctaacatagca

SEQ ID NO: 220 - RNA, 23 nt, synthetic construct
  source 1..23: mol_type = other RNA
  modified_base 1: mod_base = OTHER; note = 2'-O-Methyl ribonucleotide
  modified_base 2: mod_base = OTHER; note = 2'-fluoro ribonucleotide
  modified_base 3..6: mod_base = OTHER; note = 2'-O-Methyl ribonucleotide
  modified_base 7: mod_base = OTHER; note = 2'-fluoro ribonucleotide
  modified_base 8..11: mod_base = OTHER; note = 2'-O-Methyl ribonucleotide
  modified_base 12: mod_base = OTHER; note = 2'-fluoro ribonucleotide
  modified_base 13: mod_base = OTHER; note = 2'-O-Methyl ribonucleotide
  modified_base 14: mod_base = OTHER; note = 2'-fluoro ribonucleotide
  modified_base 15: mod_base = OTHER; note = 2'-O-Methyl ribonucleotide
  modified_base 16: mod_base = OTHER; note = 2'-fluoro ribonucleotide
  modified_base 17..23: mod_base = OTHER; note = 2'-O-Methyl ribonucleotide
  modified_base 1..3: mod_base = OTHER; note = phosphorothioate linkage
  modified_base 21..23: mod_base = OTHER; note = phosphorothioate linkage
ttttttacatcgtctaacatagc

SEQ ID NO: 221 - RNA, 23 nt, synthetic construct
  source 1..23: mol_type = other RNA
  modified_base 1: mod_base = OTHER; note = 2'-O-Methyl ribonucleotide
  modified_base 2: mod_base = OTHER; note = 2'-fluoro ribonucleotide
  modified_base 3..6: mod_base = OTHER; note = 2'-O-Methyl ribonucleotide
  modified_base 7: mod_base = OTHER; note = 2'-fluoro ribonucleotide
  modified_base 8..11: mod_base = OTHER; note = 2'-O-Methyl ribonucleotide
  modified_base 12: mod_base = OTHER; note = 2'-fluoro ribonucleotide
  modified_base 13: mod_base = OTHER; note = 2'-O-Methyl ribonucleotide
  modified_base 14: mod_base = OTHER; note = 2'-fluoro ribonucleotide
  modified_base 15: mod_base = OTHER; note = 2'-O-Methyl ribonucleotide
  modified_base 16: mod_base = OTHER; note = 2'-fluoro ribonucleotide
  modified_base 17..23: mod_base = OTHER; note = 2'-O-Methyl ribonucleotide
  modified_base 1..3: mod_base = OTHER; note = phosphorothioate linkage
  modified_base 21..23: mod_base = OTHER; note = phosphorothioate linkage
taatttttacatcgtctaacata

SEQ ID NO: 222 - RNA, 23 nt, synthetic construct
  source 1..23: mol_type = other RNA
  modified_base 1: mod_base = OTHER; note = 2'-O-Methyl ribonucleotide
  modified_base 2: mod_base = OTHER; note = 2'-fluoro ribonucleotide
  modified_base 3..6: mod_base = OTHER; note = 2'-O-Methyl ribonucleotide
  modified_base 7: mod_base = OTHER; note = 2'-fluoro ribonucleotide
  modified_base 8..11: mod_base = OTHER; note = 2'-O-Methyl ribonucleotide
  modified_base 12: mod_base = OTHER; note = 2'-fluoro ribonucleotide
  modified_base 13: mod_base = OTHER; note = 2'-O-Methyl ribonucleotide
  modified_base 14: mod_base = OTHER; note = 2'-fluoro ribonucleotide
  modified_base 15: mod_base = OTHER; note = 2'-O-Methyl ribonucleotide
  modified_base 16: mod_base = OTHER; note = 2'-fluoro ribonucleotide
  modified_base 17..23: mod_base = OTHER; note = 2'-O-Methyl ribonucleotide
  modified_base 1..3: mod_base = OTHER; note = phosphorothioate linkage
  modified_base 21..23: mod_base = OTHER; note = phosphorothioate linkage
taaaatttttacatcgtctaaca

SEQ ID NO: 223 - RNA, 23 nt, synthetic construct
  source 1..23: mol_type = other RNA
  modified_base 1: mod_base = OTHER; note = 2'-O-Methyl ribonucleotide
  modified_base 2: mod_base = OTHER; note = 2'-fluoro ribonucleotide
  modified_base 3..6: mod_base = OTHER; note = 2'-O-Methyl ribonucleotide
  modified_base 7: mod_base = OTHER; note = 2'-fluoro ribonucleotide
  modified_base 8..11: mod_base = OTHER; note = 2'-O-Methyl ribonucleotide
  modified_base 12: mod_base = OTHER; note = 2'-fluoro ribonucleotide
  modified_base 13: mod_base = OTHER; note = 2'-O-Methyl ribonucleotide
  modified_base 14: mod_base = OTHER; note = 2'-fluoro ribonucleotide
  modified_base 15: mod_base = OTHER; note = 2'-O-Methyl ribonucleotide
  modified_base 16: mod_base = OTHER; note = 2'-fluoro ribonucleotide
  modified_base 17..23: mod_base = OTHER; note = 2'-O-Methyl ribonucleotide
  modified_base 1..3: mod_base = OTHER; note = phosphorothioate linkage
  modified_base 21..23: mod_base = OTHER; note = phosphorothioate linkage
tgaggccattggctaaaattttt

SEQ ID NO: 224 - RNA, 23 nt, synthetic construct
  source 1..23: mol_type = other RNA
  modified_base 1: mod_base = OTHER; note = 2'-O-Methyl ribonucleotide
  modified_base 2: mod_base = OTHER; note = 2'-fluoro ribonucleotide
  modified_base 3..6: mod_base = OTHER; note = 2'-O-Methyl ribonucleotide
  modified_base 7: mod_base = OTHER; note = 2'-fluoro ribonucleotide
  modified_base 8..11: mod_base = OTHER; note = 2'-O-Methyl ribonucleotide
  modified_base 12: mod_base = OTHER; note = 2'-fluoro ribonucleotide
  modified_base 13: mod_base = OTHER; note = 2'-O-Methyl ribonucleotide
  modified_base 14: mod_base = OTHER; note = 2'-fluoro ribonucleotide
  modified_base 15: mod_base = OTHER; note = 2'-O-Methyl ribonucleotide
  modified_base 16: mod_base = OTHER; note = 2'-fluoro ribonucleotide
  modified_base 17..23: mod_base = OTHER; note = 2'-O-Methyl ribonucleotide
  modified_base 1..3: mod_base = OTHER; note = phosphorothioate linkage
  modified_base 21..23: mod_base = OTHER; note = phosphorothioate linkage
tggaggccattggctaaaatttt

SEQ ID NO: 225 - RNA, 23 nt, synthetic construct
  source 1..23: mol_type = other RNA
  modified_base 1: mod_base = OTHER; note = 2'-O-Methyl ribonucleotide
  modified_base 2: mod_base = OTHER; note = 2'-fluoro ribonucleotide
  modified_base 3..6: mod_base = OTHER; note = 2'-O-Methyl ribonucleotide
  modified_base 7: mod_base = OTHER; note = 2'-fluoro ribonucleotide
  modified_base 8..11: mod_base = OTHER; note = 2'-O-Methyl ribonucleotide
  modified_base 12: mod_base = OTHER; note = 2'-fluoro ribonucleotide
  modified_base 13: mod_base = OTHER; note = 2'-O-Methyl ribonucleotide
  modified_base 14: mod_base = OTHER; note = 2'-fluoro ribonucleotide
  modified_base 15: mod_base = OTHER; note = 2'-O-Methyl ribonucleotide
  modified_base 16: mod_base = OTHER; note = 2'-fluoro ribonucleotide
  modified_base 17..23: mod_base = OTHER; note = 2'-O-Methyl ribonucleotide
  modified_base 1..3: mod_base = OTHER; note = phosphorothioate linkage
  modified_base 21..23: mod_base = OTHER; note = phosphorothioate linkage
ttgaaggaggccattggctaaaa

SEQ ID NO: 226 - RNA, 23 nt, synthetic construct
  source 1..23: mol_type = other RNA
  modified_base 1: mod_base = OTHER; note = 2'-O-Methyl ribonucleotide
  modified_base 2: mod_base = OTHER; note = 2'-fluoro ribonucleotide
  modified_base 3..6: mod_base = OTHER; note = 2'-O-Methyl ribonucleotide
  modified_base 7: mod_base = OTHER; note = 2'-fluoro ribonucleotide
  modified_base 8..11: mod_base = OTHER; note = 2'-O-Methyl ribonucleotide
  modified_base 12: mod_base = OTHER; note = 2'-fluoro ribonucleotide
  modified_base 13: mod_base = OTHER; note = 2'-O-Methyl ribonucleotide
  modified_base 14: mod_base = OTHER; note = 2'-fluoro ribonucleotide
  modified_base 15: mod_base = OTHER; note = 2'-O-Methyl ribonucleotide
  modified_base 16: mod_base = OTHER; note = 2'-fluoro ribonucleotide
  modified_base 17..23: mod_base = OTHER; note = 2'-O-Methyl ribonucleotide
  modified_base 1..3: mod_base = OTHER; note = phosphorothioate linkage
  modified_base 21..23: mod_base = OTHER; note = phosphorothioate linkage
tcaactgaaggaggccattggct

SEQ ID NO: 227 - RNA, 23 nt, synthetic construct
  source 1..23: mol_type = other RNA
  modified_base 1: mod_base = OTHER; note = 2'-O-Methyl ribonucleotide
  modified_base 2: mod_base = OTHER; note = 2'-fluoro ribonucleotide
  modified_base 3..6: mod_base = OTHER; note = 2'-O-Methyl ribonucleotide
  modified_base 7: mod_base = OTHER; note = 2'-fluoro ribonucleotide
  modified_base 8..11: mod_base = OTHER; note = 2'-O-Methyl ribonucleotide
  modified_base 12: mod_base = OTHER; note = 2'-fluoro ribonucleotide
  modified_base 13: mod_base = OTHER; note = 2'-O-Methyl ribonucleotide
  modified_base 14: mod_base = OTHER; note = 2'-fluoro ribonucleotide
  modified_base 15: mod_base = OTHER; note = 2'-O-Methyl ribonucleotide
  modified_base 16: mod_base = OTHER; note = 2'-fluoro ribonucleotide
  modified_base 17..23: mod_base = OTHER; note = 2'-O-Methyl ribonucleotide
  modified_base 1..3: mod_base = OTHER; note = phosphorothioate linkage
  modified_base 21..23: mod_base = OTHER; note = phosphorothioate linkage
tccaactgaaggaggccattggc

SEQ ID NO: 228 - RNA, 23 nt, synthetic construct
  source 1..23: mol_type = other RNA
  modified_base 1: mod_base = OTHER; note = 2'-O-Methyl ribonucleotide
  modified_base 2: mod_base = OTHER; note = 2'-fluoro ribonucleotide
  modified_base 3..6: mod_base = OTHER; note = 2'-O-Methyl ribonucleotide
  modified_base 7: mod_base = OTHER; note = 2'-fluoro ribonucleotide
  modified_base 8..11: mod_base = OTHER; note = 2'-O-Methyl ribonucleotide
  modified_base 12: mod_base = OTHER; note = 2'-fluoro ribonucleotide
  modified_base 13: mod_base = OTHER; note = 2'-O-Methyl ribonucleotide
  modified_base 14: mod_base = OTHER; note = 2'-fluoro ribonucleotide
  modified_base 15: mod_base = OTHER; note = 2'-O-Methyl ribonucleotide
  modified_base 16: mod_base = OTHER; note = 2'-fluoro ribonucleotide
  modified_base 17..23: mod_base = OTHER; note = 2'-O-Methyl ribonucleotide
  modified_base 1..3: mod_base = OTHER; note = phosphorothioate linkage
  modified_base 21..23: mod_base = OTHER; note = phosphorothioate linkage
tcccaactgaaggaggccattgg

SEQ ID NO: 229 - RNA, 23 nt, synthetic construct
  source 1..23: mol_type = other RNA
  modified_base 1: mod_base = OTHER; note = 2'-O-Methyl ribonucleotide
  modified_base 2: mod_base = OTHER; note = 2'-fluoro ribonucleotide
  modified_base 3..6: mod_base = OTHER; note = 2'-O-Methyl ribonucleotide
  modified_base 7: mod_base = OTHER; note = 2'-fluoro ribonucleotide
  modified_base 8..11: mod_base = OTHER; note = 2'-O-Methyl ribonucleotide
  modified_base 12: mod_base = OTHER; note = 2'-fluoro ribonucleotide
  modified_base 13: mod_base = OTHER; note = 2'-O-Methyl ribonucleotide
  modified_base 14: mod_base = OTHER; note = 2'-fluoro ribonucleotide
  modified_base 15: mod_base = OTHER; note = 2'-O-Methyl ribonucleotide
  modified_base 16: mod_base = OTHER; note = 2'-fluoro ribonucleotide
  modified_base 17..23: mod_base = OTHER; note = 2'-O-Methyl ribonucleotide
  modified_base 1..3: mod_base = OTHER; note = phosphorothioate linkage
  modified_base 21..23: mod_base = OTHER; note = phosphorothioate linkage
tccatgtcccaactgaaggaggc

SEQ ID NO: 230 - RNA, 23 nt, synthetic construct
  source 1..23: mol_type = other RNA
  modified_base 1: mod_base = OTHER; note = 2'-O-Methyl ribonucleotide
  modified_base 2: mod_base = OTHER; note = 2'-fluoro ribonucleotide
  modified_base 3..6: mod_base = OTHER; note = 2'-O-Methyl ribonucleotide
  modified_base 7: mod_base = OTHER; note = 2'-fluoro ribonucleotide
  modified_base 8..11: mod_base = OTHER; note = 2'-O-Methyl ribonucleotide
  modified_base 12: mod_base = OTHER; note = 2'-fluoro ribonucleotide
  modified_base 13: mod_base = OTHER; note = 2'-O-Methyl ribonucleotide
  modified_base 14: mod_base = OTHER; note = 2'-fluoro ribonucleotide
  modified_base 15: mod_base = OTHER; note = 2'-O-Methyl ribonucleotide
  modified_base 16: mod_base = OTHER; note = 2'-fluoro ribonucleotide
  modified_base 17..23: mod_base = OTHER; note = 2'-O-Methyl ribonucleotide
  modified_base 1..3: mod_base = OTHER; note = phosphorothioate linkage
  modified_base 21..23: mod_base = OTHER; note = phosphorothioate linkage
tagaccatgtcccaactgaagga

SEQ ID NO: 231 - RNA, 23 nt, synthetic construct
  source 1..23: mol_type = other RNA
  modified_base 1: mod_base = OTHER; note = 2'-O-Methyl ribonucleotide
  modified_base 2: mod_base = OTHER; note = 2'-fluoro ribonucleotide
  modified_base 3..6: mod_base = OTHER; note = 2'-O-Methyl ribonucleotide
  modified_base 7: mod_base = OTHER; note = 2'-fluoro ribonucleotide
  modified_base 8..11: mod_base = OTHER; note = 2'-O-Methyl ribonucleotide
  modified_base 12: mod_base = OTHER; note = 2'-fluoro ribonucleotide
  modified_base 13: mod_base = OTHER; note = 2'-O-Methyl ribonucleotide
  modified_base 14: mod_base = OTHER; note = 2'-fluoro ribonucleotide
  modified_base 15: mod_base = OTHER; note = 2'-O-Methyl ribonucleotide
  modified_base 16: mod_base = OTHER; note = 2'-fluoro ribonucleotide
  modified_base 17..23: mod_base = OTHER; note = 2'-O-Methyl ribonucleotide
  modified_base 1..3: mod_base = OTHER; note = phosphorothioate linkage
  modified_base 21..23: mod_base = OTHER; note = phosphorothioate linkage
ttttaagaccatgtcccaactga

SEQ ID NO: 232 - RNA, 23 nt, synthetic construct
  source 1..23: mol_type = other RNA
  modified_base 1: mod_base = OTHER; note = 2'-O-Methyl ribonucleotide
  modified_base 2: mod_base = OTHER; note = 2'-fluoro ribonucleotide
  modified_base 3..6: mod_base = OTHER; note = 2'-O-Methyl ribonucleotide
  modified_base 7: mod_base = OTHER; note = 2'-fluoro ribonucleotide
  modified_base 8..11: mod_base = OTHER; note = 2'-O-Methyl ribonucleotide
  modified_base 12: mod_base = OTHER; note = 2'-fluoro ribonucleotide
  modified_base 13: mod_base = OTHER; note = 2'-O-Methyl ribonucleotide
  modified_base 14: mod_base = OTHER; note = 2'-fluoro ribonucleotide
  modified_base 15: mod_base = OTHER; note = 2'-O-Methyl ribonucleotide
  modified_base 16: mod_base = OTHER; note = 2'-fluoro ribonucleotide
  modified_base 17..23: mod_base = OTHER; note = 2'-O-Methyl ribonucleotide
  modified_base 1..3: mod_base = OTHER; note = phosphorothioate linkage
  modified_base 21..23: mod_base = OTHER; note = phosphorothioate linkage
ttctttaagaccatgtcccaact

SEQ ID NO: 233 - RNA, 23 nt, synthetic construct
  source 1..23: mol_type = other RNA
  modified_base 1: mod_base = OTHER; note = 2'-O-Methyl ribonucleotide
  modified_base 2: mod_base = OTHER; note = 2'-fluoro ribonucleotide
  modified_base 3..6: mod_base = OTHER; note = 2'-O-Methyl ribonucleotide
  modified_base 7: mod_base = OTHER; note = 2'-fluoro ribonucleotide
  modified_base 8..11: mod_base = OTHER; note = 2'-O-Methyl ribonucleotide
  modified_base 12: mod_base = OTHER; note = 2'-fluoro ribonucleotide
  modified_base 13: mod_base = OTHER; note = 2'-O-Methyl ribonucleotide
  modified_base 14: mod_base = OTHER; note = 2'-fluoro ribonucleotide
  modified_base 15: mod_base = OTHER; note = 2'-O-Methyl ribonucleotide
  modified_base 16: mod_base = OTHER; note = 2'-fluoro ribonucleotide
  modified_base 17..23: mod_base = OTHER; note = 2'-O-Methyl ribonucleotide
  modified_base 1..3: mod_base = OTHER; note = phosphorothioate linkage
  modified_base 21..23: mod_base = OTHER; note = phosphorothioate linkage
tagtctttaagaccatgtcccaa

SEQ ID NO: 234 - RNA, 23 nt, synthetic construct
  source 1..23: mol_type = other RNA
  modified_base 1: mod_base = OTHER; note = 2'-O-Methyl ribonucleotide
  modified_base 2: mod_base = OTHER; note = 2'-fluoro ribonucleotide
  modified_base 3..6: mod_base = OTHER; note = 2'-O-Methyl ribonucleotide
  modified_base 7: mod_base = OTHER; note = 2'-fluoro ribonucleotide
  modified_base 8..11: mod_base = OTHER; note = 2'-O-Methyl ribonucleotide
  modified_base 12: mod_base = OTHER; note = 2'-fluoro ribonucleotide
  modified_base 13: mod_base = OTHER; note = 2'-O-Methyl ribonucleotide
  modified_base 14: mod_base = OTHER; note = 2'-fluoro ribonucleotide
  modified_base 15: mod_base = OTHER; note = 2'-O-Methyl ribonucleotide
  modified_base 16: mod_base = OTHER; note = 2'-fluoro ribonucleotide
  modified_base 17..23: mod_base = OTHER; note = 2'-O-Methyl ribonucleotide
  modified_base 1..3: mod_base = OTHER; note = phosphorothioate linkage
  modified_base 21..23: mod_base = OTHER; note = phosphorothioate linkage
taagtctttaagaccatgtccca

SEQ ID NO: 235 - RNA, 23 nt, synthetic construct
  source 1..23: mol_type = other RNA
  modified_base 1: mod_base = OTHER; note = 2'-O-Methyl ribonucleotide
  modified_base 2: mod_base = OTHER; note = 2'-fluoro ribonucleotide
  modified_base 3..6: mod_base = OTHER; note = 2'-O-Methyl ribonucleotide
  modified_base 7: mod_base = OTHER; note = 2'-fluoro ribonucleotide
  modified_base 8..11: mod_base = OTHER; note = 2'-O-Methyl ribonucleotide
  modified_base 12: mod_base = OTHER; note = 2'-fluoro ribonucleotide
  modified_base 13: mod_base = OTHER; note = 2'-O-Methyl ribonucleotide
  modified_base 14: mod_base = OTHER; note = 2'-fluoro ribonucleotide
  modified_base 15: mod_base = OTHER; note = 2'-O-Methyl ribonucleotide
  modified_base 16: mod_base = OTHER; note = 2'-fluoro ribonucleotide
  modified_base 17..23: mod_base = OTHER; note = 2'-O-Methyl ribonucleotide
  modified_base 1..3: mod_base = OTHER; note = phosphorothioate linkage
  modified_base 21..23: mod_base = OTHER; note = phosphorothioate linkage
taaagtctttaagaccatgtccc

SEQ ID NO: 236 - RNA, 23 nt, synthetic construct
  source 1..23: mol_type = other RNA
  modified_base 1: mod_base = OTHER; note = 2'-O-Methyl ribonucleotide
  modified_base 2: mod_base = OTHER; note = 2'-fluoro ribonucleotide
  modified_base 3..6: mod_base = OTHER; note = 2'-O-Methyl ribonucleotide
  modified_base 7: mod_base = OTHER; note = 2'-fluoro ribonucleotide
  modified_base 8..11: mod_base = OTHER; note = 2'-O-Methyl ribonucleotide
  modified_base 12: mod_base = OTHER; note = 2'-fluoro ribonucleotide
  modified_base 13: mod_base = OTHER; note = 2'-O-Methyl ribonucleotide
  modified_base 14: mod_base = OTHER; note = 2'-fluoro ribonucleotide
  modified_base 15: mod_base = OTHER; note = 2'-O-Methyl ribonucleotide
  modified_base 16: mod_base = OTHER; note = 2'-fluoro ribonucleotide
  modified_base 17..23: mod_base = OTHER; note = 2'-O-Methyl ribonucleotide
  modified_base 1..3: mod_base = OTHER; note = phosphorothioate linkage
  modified_base 21..23: mod_base = OTHER; note = phosphorothioate linkage
tcaaagtctttaagaccatgtcc

SEQ ID NO: 237 - RNA, 23 nt, synthetic construct
  source 1..23: mol_type = other RNA
  modified_base 1: mod_base = OTHER; note = 2'-O-Methyl ribonucleotide
  modified_base 2: mod_base = OTHER; note = 2'-fluoro ribonucleotide
  modified_base 3..6: mod_base = OTHER; note = 2'-O-Methyl ribonucleotide
  modified_base 7: mod_base = OTHER; note = 2'-fluoro ribonucleotide
  modified_base 8..11: mod_base = OTHER; note = 2'-O-Methyl ribonucleotide
  modified_base 12: mod_base = OTHER; note = 2'-fluoro ribonucleotide
  modified_base 13: mod_base = OTHER; note = 2'-O-Methyl ribonucleotide
  modified_base 14: mod_base = OTHER; note = 2'-fluoro ribonucleotide
  modified_base 15: mod_base = OTHER; note = 2'-O-Methyl ribonucleotide
  modified_base 16: mod_base = OTHER; note = 2'-fluoro ribonucleotide
  modified_base 17..23: mod_base = OTHER; note = 2'-O-Methyl ribonucleotide
  modified_base 1..3: mod_base = OTHER; note = phosphorothioate linkage
  modified_base 21..23: mod_base = OTHER; note = phosphorothioate linkage
tacaaagtctttaagaccatgtc

SEQ ID NO: 238 - RNA, 23 nt, synthetic construct
  source 1..23: mol_type = other RNA
  modified_base 1: mod_base = OTHER; note = 2'-O-Methyl ribonucleotide
  modified_base 2: mod_base = OTHER; note = 2'-fluoro ribonucleotide
  modified_base 3..6: mod_base = OTHER; note = 2'-O-Methyl ribonucleotide
  modified_base 7: mod_base = OTHER; note = 2'-fluoro ribonucleotide
  modified_base 8..11: mod_base = OTHER; note = 2'-O-Methyl ribonucleotide
  modified_base 12: mod_base = OTHER; note = 2'-fluoro ribonucleotide
  modified_base 13: mod_base = OTHER; note = 2'-O-Methyl ribonucleotide
  modified_base 14: mod_base = OTHER; note = 2'-fluoro ribonucleotide
  modified_base 15: mod_base = OTHER; note = 2'-O-Methyl ribonucleotide
  modified_base 16: mod_base = OTHER; note = 2'-fluoro ribonucleotide
  modified_base 17..23: mod_base = OTHER; note = 2'-O-Methyl ribonucleotide
  modified_base 1..3: mod_base = OTHER; note = phosphorothioate linkage
  modified_base 21..23: mod_base = OTHER; note = phosphorothioate linkage
tcttatggacaaagtctttaaga

SEQ ID NO: 239 - RNA, 23 nt, synthetic construct
  source 1..23: mol_type = other RNA
  modified_base 1: mod_base = OTHER; note = 2'-O-Methyl ribonucleotide
  modified_base 2: mod_base = OTHER; note = 2'-fluoro ribonucleotide
  modified_base 3..6: mod_base = OTHER; note = 2'-O-Methyl ribonucleotide
  modified_base 7: mod_base = OTHER; note = 2'-fluoro ribonucleotide
  modified_base 8..11: mod_base = OTHER; note = 2'-O-Methyl ribonucleotide
  modified_base 12: mod_base = OTHER; note = 2'-fluoro ribonucleotide
  modified_base 13: mod_base = OTHER; note = 2'-O-Methyl ribonucleotide
  modified_base 14: mod_base = OTHER; note = 2'-fluoro ribonucleotide
  modified_base 15: mod_base = OTHER; note = 2'-O-Methyl ribonucleotide
  modified_base 16: mod_base = OTHER; note = 2'-fluoro ribonucleotide
  modified_base 17..23: mod_base = OTHER; note = 2'-O-Methyl ribonucleotide
  modified_base 1..3: mod_base = OTHER; note = phosphorothioate linkage
  modified_base 21..23: mod_base = OTHER; note = phosphorothioate linkage
ttcattaatttggcccttcgtct

SEQ ID NO: 240 - RNA, 23 nt, synthetic construct
  source 1..23: mol_type = other RNA
  modified_base 1: mod_base = OTHER; note = 2'-O-Methyl ribonucleotide
  modified_base 2: mod_base = OTHER; note = 2'-fluoro ribonucleotide
  modified_base 3..6: mod_base = OTHER; note = 2'-O-Methyl ribonucleotide
  modified_base 7: mod_base = OTHER; note = 2'-fluoro ribonucleotide
  modified_base 8..11: mod_base = OTHER; note = 2'-O-Methyl ribonucleotide
  modified_base 12: mod_base = OTHER; note = 2'-fluoro ribonucleotide
  modified_base 13: mod_base = OTHER; note = 2'-O-Methyl ribonucleotide
  modified_base 14: mod_base = OTHER; note = 2'-fluoro ribonucleotide
  modified_base 15: mod_base = OTHER; note = 2'-O-Methyl ribonucleotide
  modified_base 16: mod_base = OTHER; note = 2'-fluoro ribonucleotide
  modified_base 17..23: mod_base = OTHER; note = 2'-O-Methyl ribonucleotide
  modified_base 1..3: mod_base = OTHER; note = phosphorothioate linkage
  modified_base 21..23: mod_base = OTHER; note = phosphorothioate linkage
tactgatcaaatatgttgagttt

SEQ ID NO: 241 - RNA, 23 nt, synthetic construct
  source 1..23: mol_type = other RNA
  modified_base 1: mod_base = OTHER; note = 2'-O-Methyl ribonucleotide
  modified_base 2: mod_base = OTHER; note = 2'-fluoro ribonucleotide
  modified_base 3..6: mod_base = OTHER; note = 2'-O-Methyl ribonucleotide
  modified_base 7: mod_base = OTHER; note = 2'-fluoro ribonucleotide
  modified_base 8..11: mod_base = OTHER; note = 2'-O-Methyl ribonucleotide
  modified_base 12: mod_base = OTHER; note = 2'-fluoro ribonucleotide
  modified_base 13: mod_base = OTHER; note = 2'-O-Methyl ribonucleotide
  modified_base 14: mod_base = OTHER; note = 2'-fluoro ribonucleotide
  modified_base 15: mod_base = OTHER; note = 2'-O-Methyl ribonucleotide
  modified_base 16: mod_base = OTHER; note = 2'-fluoro ribonucleotide
  modified_base 17..23: mod_base = OTHER; note = 2'-O-Methyl ribonucleotide
  modified_base 1..3: mod_base = OTHER; note = phosphorothioate linkage
  modified_base 21..23: mod_base = OTHER; note = phosphorothioate linkage
taaaagactgatcaaatatgttg

SEQ ID NO: 242 - RNA, 23 nt, synthetic construct
  source 1..23: mol_type = other RNA
  modified_base 1: mod_base = OTHER; note = 2'-O-Methyl ribonucleotide
  modified_base 2: mod_base = OTHER; note = 2'-fluoro ribonucleotide
  modified_base 3..6: mod_base = OTHER; note = 2'-O-Methyl ribonucleotide
  modified_base 7: mod_base = OTHER; note = 2'-fluoro ribonucleotide
  modified_base 8..11: mod_base = OTHER; note = 2'-O-Methyl ribonucleotide
  modified_base 12: mod_base = OTHER; note = 2'-fluoro ribonucleotide
  modified_base 13: mod_base = OTHER; note = 2'-O-Methyl ribonucleotide
  modified_base 14: mod_base = OTHER; note = 2'-fluoro ribonucleotide
  modified_base 15: mod_base = OTHER; note = 2'-O-Methyl ribonucleotide
  modified_base 16: mod_base = OTHER; note = 2'-fluoro ribonucleotide
  modified_base 17..23: mod_base = OTHER; note = 2'-O-Methyl ribonucleotide
  modified_base 1..3: mod_base = OTHER; note = phosphorothioate linkage
  modified_base 21..23: mod_base = OTHER; note = phosphorothioate linkage
tagatcataaaaagactgatcaa

SEQ ID NO: 243 - RNA, 23 nt, synthetic construct
  source 1..23: mol_type = other RNA
  modified_base 1: mod_base = OTHER; note = 2'-O-Methyl ribonucleotide
  modified_base 2: mod_base = OTHER; note = 2'-fluoro ribonucleotide
  modified_base 3..6: mod_base = OTHER; note = 2'-O-Methyl ribonucleotide
  modified_base 7: mod_base = OTHER; note = 2'-fluoro ribonucleotide
  modified_base 8..11: mod_base = OTHER; note = 2'-O-Methyl ribonucleotide
  modified_base 12: mod_base = OTHER; note = 2'-fluoro ribonucleotide
  modified_base 13: mod_base = OTHER; note = 2'-O-Methyl ribonucleotide
  modified_base 14: mod_base = OTHER; note = 2'-fluoro ribonucleotide
  modified_base 15: mod_base = OTHER; note = 2'-O-Methyl ribonucleotide
  modified_base 16: mod_base = OTHER; note = 2'-fluoro ribonucleotide
  modified_base 17..23: mod_base = OTHER; note = 2'-O-Methyl ribonucleotide
  modified_base 1..3: mod_base = OTHER; note = phosphorothioate linkage
  modified_base 21..23: mod_base = OTHER; note = phosphorothioate linkage
ttagatcataaaaagactgatca

SEQ ID NO: 244 - RNA, 23 nt, synthetic construct
  source 1..23: mol_type = other RNA
  modified_base 1: mod_base = OTHER; note = 2'-O-Methyl ribonucleotide
  modified_base 2: mod_base = OTHER; note = 2'-fluoro ribonucleotide
  modified_base 3..6: mod_base = OTHER; note = 2'-O-Methyl ribonucleotide
  modified_base 7: mod_base = OTHER; note = 2'-fluoro ribonucleotide
  modified_base 8..11: mod_base = OTHER; note = 2'-O-Methyl ribonucleotide
  modified_base 12: mod_base = OTHER; note = 2'-fluoro ribonucleotide
  modified_base 13: mod_base = OTHER; note = 2'-O-Methyl ribonucleotide
  modified_base 14: mod_base = OTHER; note = 2'-fluoro ribonucleotide
  modified_base 15: mod_base = OTHER; note = 2'-O-Methyl ribonucleotide
  modified_base 16: mod_base = OTHER; note = 2'-fluoro ribonucleotide
  modified_base 17..23: mod_base = OTHER; note = 2'-O-Methyl ribonucleotide
  modified_base 1..3: mod_base = OTHER; note = phosphorothioate linkage
  modified_base 21..23: mod_base = OTHER; note = phosphorothioate linkage
tttgacttgtagtttatatgtag

SEQ ID NO: 245 - RNA, 23 nt, synthetic construct
  source 1..23: mol_type = other RNA
  modified_base 1: mod_base = OTHER; note = 2'-O-Methyl ribonucleotide
  modified_base 2: mod_base = OTHER; note = 2'-fluoro ribonucleotide
  modified_base 3..6: mod_base = OTHER; note = 2'-O-Methyl ribonucleotide
  modified_base 7: mod_base = OTHER; note = 2'-fluoro ribonucleotide
  modified_base 8..11: mod_base = OTHER; note = 2'-O-Methyl ribonucleotide
  modified_base 12: mod_base = OTHER; note = 2'-fluoro ribonucleotide
  modified_base 13: mod_base = OTHER; note = 2'-O-Methyl ribonucleotide
  modified_base 14: mod_base = OTHER; note = 2'-fluoro ribonucleotide
  modified_base 15: mod_base = OTHER; note = 2'-O-Methyl ribonucleotide
  modified_base 16: mod_base = OTHER; note = 2'-fluoro ribonucleotide
  modified_base 17..23: mod_base = OTHER; note = 2'-O-Methyl ribonucleotide
  modified_base 1..3: mod_base = OTHER; note = phosphorothioate linkage
  modified_base 21..23: mod_base = OTHER; note = phosphorothioate linkage
ttttgagttgagttcaagtgaca

SEQ ID NO: 246 - RNA, 23 nt, synthetic construct
  source 1..23: mol_type = other RNA
  modified_base 1: mod_base = OTHER; note = 2'-O-Methyl ribonucleotide
  modified_base 2: mod_base = OTHER; note = 2'-fluoro ribonucleotide
  modified_base 3..6: mod_base = OTHER; note = 2'-O-Methyl ribonucleotide
  modified_base 7: mod_base = OTHER; note = 2'-fluoro ribonucleotide
  modified_base 8..11: mod_base = OTHER; note = 2'-O-Methyl ribonucleotide
  modified_base 12: mod_base = OTHER; note = 2'-fluoro ribonucleotide
  modified_base 13: mod_base = OTHER; note = 2'-O-Methyl ribonucleotide
  modified_base 14: mod_base = OTHER; note = 2'-fluoro ribonucleotide
  modified_base 15: mod_base = OTHER; note = 2'-O-Methyl ribonucleotide
  modified_base 16: mod_base = OTHER; note = 2'-fluoro ribonucleotide
  modified_base 17..23: mod_base = OTHER; note = 2'-O-Methyl ribonucleotide
  modified_base 1..3: mod_base = OTHER; note = phosphorothioate linkage
  modified_base 21..23: mod_base = OTHER; note = phosphorothioate linkage
ttaggaggctttcaagttttgag

SEQ ID NO: 247 - RNA, 23 nt, synthetic construct
  source 1..23: mol_type = other RNA
  modified_base 1: mod_base = OTHER; note = 2'-O-Methyl ribonucleotide
  modified_base 2: mod_base = OTHER; note = 2'-fluoro ribonucleotide
  modified_base 3..6: mod_base = OTHER; note = 2'-O-Methyl ribonucleotide
  modified_base 7: mod_base = OTHER; note = 2'-fluoro ribonucleotide
  modified_base 8..11: mod_base = OTHER; note = 2'-O-Methyl ribonucleotide
  modified_base 12: mod_base = OTHER; note = 2'-fluoro ribonucleotide
  modified_base 13: mod_base = OTHER; note = 2'-O-Methyl ribonucleotide
  modified_base 14: mod_base = OTHER; note = 2'-fluoro ribonucleotide
  modified_base 15: mod_base = OTHER; note = 2'-O-Methyl ribonucleotide
  modified_base 16: mod_base = OTHER; note = 2'-fluoro ribonucleotide
  modified_base 17..23: mod_base = OTHER; note = 2'-O-Methyl ribonucleotide
  modified_base 1..3: mod_base = OTHER; note = phosphorothioate linkage
  modified_base 21..23: mod_base = OTHER; note = phosphorothioate linkage
tagttgctcttctaaatatttca

SEQ ID NO: 248 - RNA, 23 nt, synthetic construct
  source 1..23: mol_type = other RNA
  modified_base 1: mod_base = OTHER; note = 2'-O-Methyl ribonucleotide
  modified_base 2: mod_base = OTHER; note = 2'-fluoro ribonucleotide
  modified_base 3..6: mod_base = OTHER; note = 2'-O-Methyl ribonucleotide
  modified_base 7: mod_base = OTHER; note = 2'-fluoro ribonucleotide
  modified_base 8..11: mod_base = OTHER; note = 2'-O-Methyl ribonucleotide
  modified_base 12: mod_base = OTHER; note = 2'-fluoro ribonucleotide
  modified_base 13: mod_base = OTHER; note = 2'-O-Methyl ribonucleotide
  modified_base 14: mod_base = OTHER; note = 2'-fluoro ribonucleotide
  modified_base 15: mod_base = OTHER; note = 2'-O-Methyl ribonucleotide
  modified_base 16: mod_base = OTHER; note = 2'-fluoro ribonucleotide
  modified_base 17..23: mod_base = OTHER; note = 2'-O-Methyl ribonucleotide
  modified_base 1..3: mod_base = OTHER; note = phosphorothioate linkage
  modified_base 21..23: mod_base = OTHER; note = phosphorothioate linkage
tagttagttagttgctcttctaa

SEQ ID NO: 249 - RNA, 23 nt, synthetic construct
  source 1..23: mol_type = other RNA
  modified_base 1: mod_base = OTHER; note = 2'-O-Methyl ribonucleotide
  modified_base 2: mod_base = OTHER; note = 2'-fluoro ribonucleotide
  modified_base 3..6: mod_base = OTHER; note = 2'-O-Methyl ribonucleotide
  modified_base 7: mod_base = OTHER; note = 2'-fluoro ribonucleotide
  modified_base 8..11: mod_base = OTHER; note = 2'-O-Methyl ribonucleotide
  modified_base 12: mod_base = OTHER; note = 2'-fluoro ribonucleotide
  modified_base 13: mod_base = OTHER; note = 2'-O-Methyl ribonucleotide
  modified_base 14: mod_base = OTHER; note = 2'-fluoro ribonucleotide
  modified_base 15: mod_base = OTHER; note = 2'-O-Methyl ribonucleotide
  modified_base 16: mod_base = OTHER; note = 2'-fluoro ribonucleotide
  modified_base 17..23: mod_base = OTHER; note = 2'-O-Methyl ribonucleotide
  modified_base 1..3: mod_base = OTHER; note = phosphorothioate linkage
  modified_base 21..23: mod_base = OTHER; note = phosphorothioate linkage
ttaagttagttagttgctcttct

SEQ ID NO: 250 - RNA, 23 nt, synthetic construct
  source 1..23: mol_type = other RNA
  modified_base 1: mod_base = OTHER; note = 2'-O-Methyl ribonucleotide
  modified_base 2: mod_base = OTHER; note = 2'-fluoro ribonucleotide
  modified_base 3..6: mod_base = OTHER; note = 2'-O-Methyl ribonucleotide
  modified_base 7: mod_base = OTHER; note = 2'-fluoro ribonucleotide
  modified_base 8..11: mod_base = OTHER; note = 2'-O-Methyl ribonucleotide
  modified_base 12: mod_base = OTHER; note = 2'-fluoro ribonucleotide
  modified_base 13: mod_base = OTHER; note = 2'-O-Methyl ribonucleotide
  modified_base 14: mod_base = OTHER; note = 2'-fluoro ribonucleotide
  modified_base 15: mod_base = OTHER; note = 2'-O-Methyl ribonucleotide
  modified_base 16: mod_base = OTHER; note = 2'-fluoro ribonucleotide
  modified_base 17..23: mod_base = OTHER; note = 2'-O-Methyl ribonucleotide
  modified_base 1..3: mod_base = OTHER; note = phosphorothioate linkage
  modified_base 21..23: mod_base = OTHER; note = phosphorothioate linkage
tttaagttagttagttgctcttc

SEQ ID NO: 251 - RNA, 23 nt, synthetic construct
  source 1..23: mol_type = other RNA
  modified_base 1: mod_base = OTHER; note = 2'-O-Methyl ribonucleotide
  modified_base 2: mod_base = OTHER; note = 2'-fluoro ribonucleotide
  modified_base 3..6: mod_base = OTHER; note = 2'-O-Methyl ribonucleotide
  modified_base 7: mod_base = OTHER; note = 2'-fluoro ribonucleotide
  modified_base 8..11: mod_base = OTHER; note = 2'-O-Methyl ribonucleotide
  modified_base 12: mod_base = OTHER; note = 2'-fluoro ribonucleotide
  modified_base 13: mod_base = OTHER; note = 2'-O-Methyl ribonucleotide
  modified_base 14: mod_base = OTHER; note = 2'-fluoro ribonucleotide
  modified_base 15: mod_base = OTHER; note = 2'-O-Methyl ribonucleotide
  modified_base 16: mod_base = OTHER; note = 2'-fluoro ribonucleotide
  modified_base 17..23: mod_base = OTHER; note = 2'-O-Methyl ribonucleotide
  modified_base 1..3: mod_base = OTHER; note = phosphorothioate linkage
  modified_base 21..23: mod_base = OTHER; note = phosphorothioate linkage
tattaagttagttagttgctctt

SEQ ID NO: 252 - RNA, 23 nt, synthetic construct
  source 1..23: mol_type = other RNA
  modified_base 1: mod_base = OTHER; note = 2'-O-Methyl ribonucleotide
  modified_base 2: mod_base = OTHER; note = 2'-fluoro ribonucleotide
  modified_base 3..6: mod_base = OTHER; note = 2'-O-Methyl ribonucleotide
  modified_base 7: mod_base = OTHER; note = 2'-fluoro ribonucleotide
  modified_base 8..11: mod_base = OTHER; note = 2'-O-Methyl ribonucleotide
  modified_base 12: mod_base = OTHER; note = 2'-fluoro ribonucleotide
  modified_base 13: mod_base = OTHER; note = 2'-O-Methyl ribonucleotide
  modified_base 14: mod_base = OTHER; note = 2'-fluoro ribonucleotide
  modified_base 15: mod_base = OTHER; note = 2'-O-Methyl ribonucleotide
  modified_base 16: mod_base = OTHER; note = 2'-fluoro ribonucleotide
  modified_base 17..23: mod_base = OTHER; note = 2'-O-Methyl ribonucleotide
  modified_base 1..3: mod_base = OTHER; note = phosphorothioate linkage
  modified_base 21..23: mod_base = OTHER; note = phosphorothioate linkage
tgttgattttgaattaagttagt

SEQ ID NO: 253 - RNA, 23 nt, synthetic construct
  source 1..23: mol_type = other RNA
  modified_base 1: mod_base = OTHER; note = 2'-O-Methyl ribonucleotide
  modified_base 2: mod_base = OTHER; note = 2'-fluoro ribonucleotide
  modified_base 3..6: mod_base = OTHER; note = 2'-O-Methyl ribonucleotide
  modified_base 7: mod_base = OTHER; note = 2'-fluoro ribonucleotide
  modified_base 8..11: mod_base = OTHER; note = 2'-O-Methyl ribonucleotide
  modified_base 12: mod_base = OTHER; note = 2'-fluoro ribonucleotide
  modified_base 13: mod_base = OTHER; note = 2'-O-Methyl ribonucleotide
  modified_base 14: mod_base = OTHER; note = 2'-fluoro ribonucleotide
  modified_base 15: mod_base = OTHER; note = 2'-O-Methyl ribonucleotide
  modified_base 16: mod_base = OTHER; note = 2'-fluoro ribonucleotide
  modified_base 17..23: mod_base = OTHER; note = 2'-O-Methyl ribonucleotide
  modified_base 1..3: mod_base = OTHER; note = phosphorothioate linkage
  modified_base 21..23: mod_base = OTHER; note = phosphorothioate linkage
taagtgaagttacttctgggtgt

SEQ ID NO: 254 - RNA, 23 nt, synthetic construct
  source 1..23: mol_type = other RNA
  modified_base 1: mod_base = OTHER; note = 2'-O-Methyl ribonucleotide
  modified_base 2: mod_base = OTHER; note = 2'-fluoro ribonucleotide
  modified_base 3..6: mod_base = OTHER; note = 2'-O-Methyl ribonucleotide
  modified_base 7: mod_base = OTHER; note = 2'-fluoro ribonucleotide
  modified_base 8..11: mod_base = OTHER; note = 2'-O-Methyl ribonucleotide
  modified_base 12: mod_base = OTHER; note = 2'-fluoro ribonucleotide
  modified_base 13: mod_base = OTHER; note = 2'-O-Methyl ribonucleotide
  modified_base 14: mod_base = OTHER; note = 2'-fluoro ribonucleotide
  modified_base 15: mod_base = OTHER; note = 2'-O-Methyl ribonucleotide
  modified_base 16: mod_base = OTHER; note = 2'-fluoro ribonucleotide
  modified_base 17..23: mod_base = OTHER; note = 2'-O-Methyl ribonucleotide
  modified_base 1..3: mod_base = OTHER; note = phosphorothioate linkage
  modified_base 21..23: mod_base = OTHER; note = phosphorothioate linkage
ttaagtgaagttacttctgggtg

SEQ ID NO: 255 - RNA, 23 nt, synthetic construct
  source 1..23: mol_type = other RNA
  modified_base 1: mod_base = OTHER; note = 2'-O-Methyl ribonucleotide
  modified_base 2: mod_base = OTHER; note = 2'-fluoro ribonucleotide
  modified_base 3..6: mod_base = OTHER; note = 2'-O-Methyl ribonucleotide
  modified_base 7: mod_base = OTHER; note = 2'-fluoro ribonucleotide
  modified_base 8..11: mod_base = OTHER; note = 2'-O-Methyl ribonucleotide
  modified_base 12: mod_base = OTHER; note = 2'-fluoro ribonucleotide
  modified_base 13: mod_base = OTHER; note = 2'-O-Methyl ribonucleotide
  modified_base 14: mod_base = OTHER; note = 2'-fluoro ribonucleotide
  modified_base 15: mod_base = OTHER; note = 2'-O-Methyl ribonucleotide
  modified_base 16: mod_base = OTHER; note = 2'-fluoro ribonucleotide
  modified_base 17..23: mod_base = OTHER; note = 2'-O-Methyl ribonucleotide
  modified_base 1..3: mod_base = OTHER; note = phosphorothioate linkage
  modified_base 21..23: mod_base = OTHER; note = phosphorothioate linkage
tgatgctattatcttgtttttct

SEQ ID NO: 256 - RNA, 23 nt, synthetic construct
  source 1..23: mol_type = other RNA
  modified_base 1: mod_base = OTHER; note = 2'-O-Methyl ribonucleotide
  modified_base 2: mod_base = OTHER; note = 2'-fluoro ribonucleotide
  modified_base 3..6: mod_base = OTHER; note = 2'-O-Methyl ribonucleotide
  modified_base 7: mod_base = OTHER; note = 2'-fluoro ribonucleotide
  modified_base 8..11: mod_base = OTHER; note = 2'-O-Methyl ribonucleotide
  modified_base 12: mod_base = OTHER; note = 2'-fluoro ribonucleotide
  modified_base 13: mod_base = OTHER; note = 2'-O-Methyl ribonucleotide
  modified_base 14: mod_base = OTHER; note = 2'-fluoro ribonucleotide
  modified_base 15: mod_base = OTHER; note = 2'-O-Methyl ribonucleotide
  modified_base 16: mod_base = OTHER; note = 2'-fluoro ribonucleotide
  modified_base 17..23: mod_base = OTHER; note = 2'-O-Methyl ribonucleotide
  modified_base 1..3: mod_base = OTHER; note = phosphorothioate linkage
  modified_base 21..23: mod_base = OTHER; note = phosphorothioate linkage
tttgatgctattatcttgttttt

SEQ ID NO: 257 - RNA, 23 nt, synthetic construct
  source 1..23: mol_type = other RNA
  modified_base 1: mod_base = OTHER; note = 2'-O-Methyl ribonucleotide
  modified_base 2: mod_base = OTHER; note = 2'-fluoro ribonucleotide
  modified_base 3..6: mod_base = OTHER; note = 2'-O-Methyl ribonucleotide
  modified_base 7: mod_base = OTHER; note = 2'-fluoro ribonucleotide
  modified_base 8..11: mod_base = OTHER; note = 2'-O-Methyl ribonucleotide
  modified_base 12: mod_base = OTHER; note = 2'-fluoro ribonucleotide
  modified_base 13: mod_base = OTHER; note = 2'-O-Methyl ribonucleotide
  modified_base 14: mod_base = OTHER; note = 2'-fluoro ribonucleotide
  modified_base 15: mod_base = OTHER; note = 2'-O-Methyl ribonucleotide
  modified_base 16: mod_base = OTHER; note = 2'-fluoro ribonucleotide
  modified_base 17..23: mod_base = OTHER; note = 2'-O-Methyl ribonucleotide
  modified_base 1..3: mod_base = OTHER; note = phosphorothioate linkage
  modified_base 21..23: mod_base = OTHER; note = phosphorothioate linkage
tggtctttgatgctattatcttg

SEQ ID NO: 258 - RNA, 23 nt, synthetic construct
  source 1..23: mol_type = other RNA
  modified_base 1: mod_base = OTHER; note = 2'-O-Methyl ribonucleotide
  modified_base 2: mod_base = OTHER; note = 2'-fluoro ribonucleotide
  modified_base 3..6: mod_base = OTHER; note = 2'-O-Methyl ribonucleotide
  modified_base 7: mod_base = OTHER; note = 2'-fluoro ribonucleotide
  modified_base 8..11: mod_base = OTHER; note = 2'-O-Methyl ribonucleotide
  modified_base 12: mod_base = OTHER; note = 2'-fluoro ribonucleotide
  modified_base 13: mod_base = OTHER; note = 2'-O-Methyl ribonucleotide
  modified_base 14: mod_base = OTHER; note = 2'-fluoro ribonucleotide
  modified_base 15: mod_base = OTHER; note = 2'-O-Methyl ribonucleotide
  modified_base 16: mod_base = OTHER; note = 2'-fluoro ribonucleotide
  modified_base 17..23: mod_base = OTHER; note = 2'-O-Methyl ribonucleotide
  modified_base 1..3: mod_base = OTHER; note = phosphorothioate linkage
  modified_base 21..23: mod_base = OTHER; note = phosphorothioate linkage
taaggtctttgatgctattatct

SEQ ID NO: 259 - RNA, 23 nt, synthetic construct
  source 1..23: mol_type = other RNA
  modified_base 1: mod_base = OTHER; note = 2'-O-Methyl ribonucleotide
  modified_base 2: mod_base = OTHER; note = 2'-fluoro ribonucleotide
  modified_base 3..6: mod_base = OTHER; note = 2'-O-Methyl ribonucleotide
  modified_base 7: mod_base = OTHER; note = 2'-fluoro ribonucleotide
  modified_base 8..11: mod_base = OTHER; note = 2'-O-Methyl ribonucleotide
  modified_base 12: mod_base = OTHER; note = 2'-fluoro ribonucleotide
  modified_base 13: mod_base = OTHER; note = 2'-O-Methyl ribonucleotide
  modified_base 14: mod_base = OTHER; note = 2'-fluoro ribonucleotide
  modified_base 15: mod_base = OTHER; note = 2'-O-Methyl ribonucleotide
  modified_base 16: mod_base = OTHER; note = 2'-fluoro ribonucleotide
  modified_base 17..23: mod_base = OTHER; note = 2'-O-Methyl ribonucleotide
  modified_base 1..3: mod_base = OTHER; note = phosphorothioate linkage
  modified_base 21..23: mod_base = OTHER; note = phosphorothioate linkage
tctatgctgttggtttaattgtt

SEQ ID NO: 260 - RNA, 23 nt, synthetic construct
  source 1..23: mol_type = other RNA
  modified_base 1: mod_base = OTHER; note = 2'-O-Methyl ribonucleotide
  modified_base 2: mod_base = OTHER; note = 2'-fluoro ribonucleotide
  modified_base 3..6: mod_base = OTHER; note = 2'-O-Methyl ribonucleotide
  modified_base 7: mod_base = OTHER; note = 2'-fluoro ribonucleotide
  modified_base 8..11: mod_base = OTHER; note = 2'-O-Methyl ribonucleotide
  modified_base 12: mod_base = OTHER; note = 2'-fluoro ribonucleotide
  modified_base 13: mod_base = OTHER; note = 2'-O-Methyl ribonucleotide
  modified_base 14: mod_base = OTHER; note = 2'-fluoro ribonucleotide
  modified_base 15: mod_base = OTHER; note = 2'-O-Methyl ribonucleotide
  modified_base 16: mod_base = OTHER; note = 2'-fluoro ribonucleotide
  modified_base 17..23: mod_base = OTHER; note = 2'-O-Methyl ribonucleotide
  modified_base 1..3: mod_base = OTHER; note = phosphorothioate linkage
  modified_base 21..23: mod_base = OTHER; note = phosphorothioate linkage
tatttgactatgctgttggttta

SEQ ID NO: 261 - RNA, 23 nt, synthetic construct
  source 1..23: mol_type = other RNA
  modified_base 1: mod_base = OTHER; note = 2'-O-Methyl ribonucleotide
  modified_base 2: mod_base = OTHER; note = 2'-fluoro ribonucleotide
  modified_base 3..6: mod_base = OTHER; note = 2'-O-Methyl ribonucleotide
  modified_base 7: mod_base = OTHER; note = 2'-fluoro ribonucleotide
  modified_base 8..11: mod_base = OTHER; note = 2'-O-Methyl ribonucleotide
  modified_base 12: mod_base = OTHER; note = 2'-fluoro ribonucleotide
  modified_base 13: mod_base = OTHER; note = 2'-O-Methyl ribonucleotide
  modified_base 14: mod_base = OTHER; note = 2'-fluoro ribonucleotide
  modified_base 15: mod_base = OTHER; note = 2'-O-Methyl ribonucleotide
  modified_base 16: mod_base = OTHER; note = 2'-fluoro ribonucleotide
  modified_base 17..23: mod_base = OTHER; note = 2'-O-Methyl ribonucleotide
  modified_base 1..3: mod_base = OTHER; note = phosphorothioate linkage
  modified_base 21..23: mod_base = OTHER; note = phosphorothioate linkage
tagttcttggtgctcttggcttg

SEQ ID NO: 262 - RNA, 23 nt, synthetic construct
  source 1..23: mol_type = other RNA
  modified_base 1: mod_base = OTHER; note = 2'-O-Methyl ribonucleotide
  modified_base 2: mod_base = OTHER; note = 2'-fluoro ribonucleotide
  modified_base 3..6: mod_base = OTHER; note = 2'-O-Methyl ribonucleotide
  modified_base 7: mod_base = OTHER; note = 2'-fluoro ribonucleotide
  modified_base 8..11: mod_base = OTHER; note = 2'-O-Methyl ribonucleotide
  modified_base 12: mod_base = OTHER; note = 2'-fluoro ribonucleotide
  modified_base 13: mod_base = OTHER; note = 2'-O-Methyl ribonucleotide
  modified_base 14: mod_base = OTHER; note = 2'-fluoro ribonucleotide
  modified_base 15: mod_base = OTHER; note = 2'-O-Methyl ribonucleotide
  modified_base 16: mod_base = OTHER; note = 2'-fluoro ribonucleotide
  modified_base 17..23: mod_base = OTHER; note = 2'-O-Methyl ribonucleotide
  modified_base 1..3: mod_base = OTHER; note = phosphorothioate linkage
  modified_base 21..23: mod_base = OTHER; note = phosphorothioate linkage
tttgagagttgctgggtctgatg

SEQ ID NO: 263 - RNA, 23 nt, synthetic construct
  source 1..23: mol_type = other RNA
  modified_base 1: mod_base = OTHER; note = 2'-O-Methyl ribonucleotide
  modified_base 2: mod_base = OTHER; note = 2'-fluoro ribonucleotide
  modified_base 3..6: mod_base = OTHER; note = 2'-O-Methyl ribonucleotide
  modified_base 7: mod_base = OTHER; note = 2'-fluoro ribonucleotide
  modified_base 8..11: mod_base = OTHER; note = 2'-O-Methyl ribonucleotide
  modified_base 12: mod_base = OTHER; note = 2'-fluoro ribonucleotide
  modified_base 13: mod_base = OTHER; note = 2'-O-Methyl ribonucleotide
  modified_base 14: mod_base = OTHER; note = 2'-fluoro ribonucleotide
  modified_base 15: mod_base = OTHER; note = 2'-O-Methyl ribonucleotide
  modified_base 16: mod_base = OTHER; note = 2'-fluoro ribonucleotide
  modified_base 17..23: mod_base = OTHER; note = 2'-O-Methyl ribonucleotide
  modified_base 1..3: mod_base = OTHER; note = phosphorothioate linkage
  modified_base 21..23: mod_base = OTHER; note = phosphorothioate linkage
tcttgagagttgctgggtctgat

SEQ ID NO: 264 - RNA, 23 nt, synthetic construct
  source 1..23: mol_type = other RNA
  modified_base 1: mod_base = OTHER; note = 2'-O-Methyl ribonucleotide
  modified_base 2: mod_base = OTHER; note = 2'-fluoro ribonucleotide
  modified_base 3..6: mod_base = OTHER; note = 2'-O-Methyl ribonucleotide
  modified_base 7: mod_base = OTHER; note = 2'-fluoro ribonucleotide
  modified_base 8..11: mod_base = OTHER; note = 2'-O-Methyl ribonucleotide
  modified_base 12: mod_base = OTHER; note = 2'-fluoro ribonucleotide
  modified_base 13: mod_base = OTHER; note = 2'-O-Methyl ribonucleotide
  modified_base 14: mod_base = OTHER; note = 2'-fluoro ribonucleotide
  modified_base 15: mod_base = OTHER; note = 2'-O-Methyl ribonucleotide
  modified_base 16: mod_base = OTHER; note = 2'-fluoro ribonucleotide
  modified_base 17..23: mod_base = OTHER; note = 2'-O-Methyl ribonucleotide
  modified_base 1..3: mod_base = OTHER; note = phosphorothioate linkage
  modified_base 21..23: mod_base = OTHER; note = phosphorothioate linkage
tacttgagagttgctgggtctga

SEQ ID NO: 265 - RNA, 23 nt, synthetic construct
  source 1..23: mol_type = other RNA
  modified_base 1: mod_base = OTHER; note = 2'-O-Methyl ribonucleotide
  modified_base 2: mod_base = OTHER; note = 2'-fluoro ribonucleotide
  modified_base 3..6: mod_base = OTHER; note = 2'-O-Methyl ribonucleotide
  modified_base 7: mod_base = OTHER; note = 2'-fluoro ribonucleotide
  modified_base 8..11: mod_base = OTHER; note = 2'-O-Methyl ribonucleotide
  modified_base 12: mod_base = OTHER; note = 2'-fluoro ribonucleotide
  modified_base 13: mod_base = OTHER; note = 2'-O-Methyl ribonucleotide
  modified_base 14: mod_base = OTHER; note = 2'-fluoro ribonucleotide
  modified_base 15: mod_base = OTHER; note = 2'-O-Methyl ribonucleotide
  modified_base 16: mod_base = OTHER; note = 2'-fluoro ribonucleotide
  modified_base 17..23: mod_base = OTHER; note = 2'-O-Methyl ribonucleotide
  modified_base 1..3: mod_base = OTHER; note = phosphorothioate linkage
  modified_base 21..23: mod_base = OTHER; note = phosphorothioate linkage
ttgaaaaacttgagagttgctgg

SEQ ID NO: 266 - RNA, 23 nt, synthetic construct
  source 1..23: mol_type = other RNA
  modified_base 1: mod_base = OTHER; note = 2'-O-Methyl ribonucleotide
  modified_base 2: mod_base = OTHER; note = 2'-fluoro ribonucleotide
  modified_base 3..6: mod_base = OTHER; note = 2'-O-Methyl ribonucleotide
  modified_base 7: mod_base = OTHER; note = 2'-fluoro ribonucleotide
  modified_base 8..11: mod_base = OTHER; note = 2'-O-Methyl ribonucleotide
  modified_base 12: mod_base = OTHER; note = 2'-fluoro ribonucleotide
  modified_base 13: mod_base = OTHER; note = 2'-O-Methyl ribonucleotide
  modified_base 14: mod_base = OTHER; note = 2'-fluoro ribonucleotide
  modified_base 15: mod_base = OTHER; note = 2'-O-Methyl ribonucleotide
  modified_base 16: mod_base = OTHER; note = 2'-fluoro ribonucleotide
  modified_base 17..23: mod_base = OTHER; note = 2'-O-Methyl ribonucleotide
  modified_base 1..3: mod_base = OTHER; note = phosphorothioate linkage
  modified_base 21..23: mod_base = OTHER; note = phosphorothioate linkage
tccatggactacctgatataaca

SEQ ID NO: 267 - RNA, 23 nt, synthetic construct
  source 1..23: mol_type = other RNA
  modified_base 1: mod_base = OTHER; note = 2'-O-Methyl ribonucleotide
  modified_base 2: mod_base = OTHER; note = 2'-fluoro ribonucleotide
  modified_base 3..6: mod_base = OTHER; note = 2'-O-Methyl ribonucleotide
  modified_base 7: mod_base = OTHER; note = 2'-fluoro ribonucleotide
  modified_base 8..11: mod_base = OTHER; note = 2'-O-Methyl ribonucleotide
  modified_base 12: mod_base = OTHER; note = 2'-fluoro ribonucleotide
  modified_base 13: mod_base = OTHER; note = 2'-O-Methyl ribonucleotide
  modified_base 14: mod_base = OTHER; note = 2'-fluoro ribonucleotide
  modified_base 15: mod_base = OTHER; note = 2'-O-Methyl ribonucleotide
  modified_base 16: mod_base = OTHER; note = 2'-fluoro ribonucleotide
  modified_base 17..23: mod_base = OTHER; note = 2'-O-Methyl ribonucleotide
  modified_base 1..3: mod_base = OTHER; note = phosphorothioate linkage
  modified_base 21..23: mod_base = OTHER; note = phosphorothioate linkage
ttgtccatggactacctgatata

SEQ ID NO: 268 - RNA, 23 nt, synthetic construct
  source 1..23: mol_type = other RNA
  modified_base 1: mod_base = OTHER; note = 2'-O-Methyl ribonucleotide
  modified_base 2: mod_base = OTHER; note = 2'-fluoro ribonucleotide
  modified_base 3..6: mod_base = OTHER; note = 2'-O-Methyl ribonucleotide
  modified_base 7: mod_base = OTHER; note = 2'-fluoro ribonucleotide
  modified_base 8..11: mod_base = OTHER; note = 2'-O-Methyl ribonucleotide
  modified_base 12: mod_base = OTHER; note = 2'-fluoro ribonucleotide
  modified_base 13: mod_base = OTHER; note = 2'-O-Methyl ribonucleotide
  modified_base 14: mod_base = OTHER; note = 2'-fluoro ribonucleotide
  modified_base 15: mod_base = OTHER; note = 2'-O-Methyl ribonucleotide
  modified_base 16: mod_base = OTHER; note = 2'-fluoro ribonucleotide
  modified_base 17..23: mod_base = OTHER; note = 2'-O-Methyl ribonucleotide
  modified_base 1..3: mod_base = OTHER; note = phosphorothioate linkage
  modified_base 21..23: mod_base = OTHER; note = phosphorothioate linkage
tatgtccatggactacctgatat

SEQ ID NO: 269 - RNA, 23 nt, synthetic construct
  source 1..23: mol_type = other RNA
  modified_base 1: mod_base = OTHER; note = 2'-O-Methyl ribonucleotide
  modified_base 2: mod_base = OTHER; note = 2'-fluoro ribonucleotide
  modified_base 3..6: mod_base = OTHER; note = 2'-O-Methyl ribonucleotide
  modified_base 7: mod_base = OTHER; note = 2'-fluoro ribonucleotide
  modified_base 8..11: mod_base = OTHER; note = 2'-O-Methyl ribonucleotide
  modified_base 12: mod_base = OTHER; note = 2'-fluoro ribonucleotide
  modified_base 13: mod_base = OTHER; note = 2'-O-Methyl ribonucleotide
  modified_base 14: mod_base = OTHER; note = 2'-fluoro ribonucleotide
  modified_base 15: mod_base = OTHER; note = 2'-O-Methyl ribonucleotide
  modified_base 16: mod_base = OTHER; note = 2'-fluoro ribonucleotide
  modified_base 17..23: mod_base = OTHER; note = 2'-O-Methyl ribonucleotide
  modified_base 1..3: mod_base = OTHER; note = phosphorothioate linkage
  modified_base 21..23: mod_base = OTHER; note = phosphorothioate linkage
taatgtccatggactacctgata

SEQ ID NO: 270 - RNA, 23 nt, synthetic construct
  source 1..23: mol_type = other RNA
  modified_base 1: mod_base = OTHER; note = 2'-O-Methyl ribonucleotide
  modified_base 2: mod_base = OTHER; note = 2'-fluoro ribonucleotide
  modified_base 3..6: mod_base = OTHER; note = 2'-O-Methyl ribonucleotide
  modified_base 7: mod_base = OTHER; note = 2'-fluoro ribonucleotide
  modified_base 8..11: mod_base = OTHER; note = 2'-O-Methyl ribonucleotide
  modified_base 12: mod_base = OTHER; note = 2'-fluoro ribonucleotide
  modified_base 13: mod_base = OTHER; note = 2'-O-Methyl ribonucleotide
  modified_base 14: mod_base = OTHER; note = 2'-fluoro ribonucleotide
  modified_base 15: mod_base = OTHER; note = 2'-O-Methyl ribonucleotide
  modified_base 16: mod_base = OTHER; note = 2'-fluoro ribonucleotide
  modified_base 17..23: mod_base = OTHER; note = 2'-O-Methyl ribonucleotide
  modified_base 1..3: mod_base = OTHER; note = phosphorothioate linkage
  modified_base 21..23: mod_base = OTHER; note = phosphorothioate linkage
ttgaattaatgtccatggactac

SEQ ID NO: 271 - RNA, 23 nt, synthetic construct
  source 1..23: mol_type = other RNA
  modified_base 1: mod_base = OTHER; note = 2'-O-Methyl ribonucleotide
  modified_base 2: mod_base = OTHER; note = 2'-fluoro ribonucleotide
  modified_base 3..6: mod_base = OTHER; note = 2'-O-Methyl ribonucleotide
  modified_base 7: mod_base = OTHER; note = 2'-fluoro ribonucleotide
  modified_base 8..11: mod_base = OTHER; note = 2'-O-Methyl ribonucleotide
  modified_base 12: mod_base = OTHER; note = 2'-fluoro ribonucleotide
  modified_base 13: mod_base = OTHER; note = 2'-O-Methyl ribonucleotide
  modified_base 14: mod_base = OTHER; note = 2'-fluoro ribonucleotide
  modified_base 15: mod_base = OTHER; note = 2'-O-Methyl ribonucleotide
  modified_base 16: mod_base = OTHER; note = 2'-fluoro ribonucleotide
  modified_base 17..23: mod_base = OTHER; note = 2'-O-Methyl ribonucleotide
  modified_base 1..3: mod_base = OTHER; note = phosphorothioate linkage
  modified_base 21..23: mod_base = OTHER; note = phosphorothioate linkage
tttgaattaatgtccatggacta

SEQ ID NO: 272 - RNA, 23 nt, synthetic construct
  source 1..23: mol_type = other RNA
  modified_base 1: mod_base = OTHER; note = 2'-O-Methyl ribonucleotide
  modified_base 2: mod_base = OTHER; note = 2'-fluoro ribonucleotide
  modified_base 3..6: mod_base = OTHER; note = 2'-O-Methyl ribonucleotide
  modified_base 7: mod_base = OTHER; note = 2'-fluoro ribonucleotide
  modified_base 8..11: mod_base = OTHER; note = 2'-O-Methyl ribonucleotide
  modified_base 12: mod_base = OTHER; note = 2'-fluoro ribonucleotide
  modified_base 13: mod_base = OTHER; note = 2'-O-Methyl ribonucleotide
  modified_base 14: mod_base = OTHER; note = 2'-fluoro ribonucleotide
  modified_base 15: mod_base = OTHER; note = 2'-O-Methyl ribonucleotide
  modified_base 16: mod_base = OTHER; note = 2'-fluoro ribonucleotide
  modified_base 17..23: mod_base = OTHER; note = 2'-O-Methyl ribonucleotide
  modified_base 1..3: mod_base = OTHER; note = phosphorothioate linkage
  modified_base 21..23: mod_base = OTHER; note = phosphorothioate linkage
tgttgaattaatgtccatggact

SEQ ID NO: 273 - RNA, 23 nt, synthetic construct
  source 1..23: mol_type = other RNA
  modified_base 1: mod_base = OTHER; note = 2'-O-Methyl ribonucleotide
  modified_base 2: mod_base = OTHER; note = 2'-fluoro ribonucleotide
  modified_base 3..6: mod_base = OTHER; note = 2'-O-Methyl ribonucleotide
  modified_base 7: mod_base = OTHER; note = 2'-fluoro ribonucleotide
  modified_base 8..11: mod_base = OTHER; note = 2'-O-Methyl ribonucleotide
  modified_base 12: mod_base = OTHER; note = 2'-fluoro ribonucleotide
  modified_base 13: mod_base = OTHER; note = 2'-O-Methyl ribonucleotide
  modified_base 14: mod_base = OTHER; note = 2'-fluoro ribonucleotide
  modified_base 15: mod_base = OTHER; note = 2'-O-Methyl ribonucleotide
  modified_base 16: mod_base = OTHER; note = 2'-fluoro ribonucleotide
  modified_base 17..23: mod_base = OTHER; note = 2'-O-Methyl ribonucleotide
  modified_base 1..3: mod_base = OTHER; note = phosphorothioate linkage
  modified_base 21..23: mod_base = OTHER; note = phosphorothioate linkage
ttcgatgttgaattaatgtccat

SEQ ID NO: 274 - RNA, 23 nt, synthetic construct
  source 1..23: mol_type = other RNA
  modified_base 1: mod_base = OTHER; note = 2'-O-Methyl ribonucleotide
  modified_base 2: mod_base = OTHER; note = 2'-fluoro ribonucleotide
  modified_base 3..6: mod_base = OTHER; note = 2'-O-Methyl ribonucleotide
  modified_base 7: mod_base = OTHER; note = 2'-fluoro ribonucleotide
  modified_base 8..11: mod_base = OTHER; note = 2'-O-Methyl ribonucleotide
  modified_base 12: mod_base = OTHER; note = 2'-fluoro ribonucleotide
  modified_base 13: mod_base = OTHER; note = 2'-O-Methyl ribonucleotide
  modified_base 14: mod_base = OTHER; note = 2'-fluoro ribonucleotide
  modified_base 15: mod_base = OTHER; note = 2'-O-Methyl ribonucleotide
  modified_base 16: mod_base = OTHER; note = 2'-fluoro ribonucleotide
  modified_base 17..23: mod_base = OTHER; note = 2'-O-Methyl ribonucleotide
  modified_base 1..3: mod_base = OTHER; note = phosphorothioate linkage
  modified_base 21..23: mod_base = OTHER; note = phosphorothioate linkage
tattcgatgttgaattaatgtcc

SEQ ID NO: 275 - RNA, 23 nt, synthetic construct
  source 1..23: mol_type = other RNA
  modified_base 1: mod_base = OTHER; note = 2'-O-Methyl ribonucleotide
  modified_base 2: mod_base = OTHER; note = 2'-fluoro ribonucleotide
  modified_base 3..6: mod_base = OTHER; note = 2'-O-Methyl ribonucleotide
  modified_base 7: mod_base = OTHER; note = 2'-fluoro ribonucleotide
  modified_base 8..11: mod_base = OTHER; note = 2'-O-Methyl ribonucleotide
  modified_base 12: mod_base = OTHER; note = 2'-fluoro ribonucleotide
  modified_base 13: mod_base = OTHER; note = 2'-O-Methyl ribonucleotide
  modified_base 14: mod_base = OTHER; note = 2'-fluoro ribonucleotide
  modified_base 15: mod_base = OTHER; note = 2'-O-Methyl ribonucleotide
  modified_base 16: mod_base = OTHER; note = 2'-fluoro ribonucleotide
  modified_base 17..23: mod_base = OTHER; note = 2'-O-Methyl ribonucleotide
  modified_base 1..3: mod_base = OTHER; note = phosphorothioate linkage
  modified_base 21..23: mod_base = OTHER; note = phosphorothioate linkage
ttattcgatgttgaattaatgtc

SEQ ID NO: 276 - RNA, 23 nt, synthetic construct
  source 1..23: mol_type = other RNA
  modified_base 1: mod_base = OTHER; note = 2'-O-Methyl ribonucleotide
  modified_base 2: mod_base = OTHER; note = 2'-fluoro ribonucleotide
  modified_base 3..6: mod_base = OTHER; note = 2'-O-Methyl ribonucleotide
  modified_base 7: mod_base = OTHER; note = 2'-fluoro ribonucleotide
  modified_base 8..11: mod_base = OTHER; note = 2'-O-Methyl ribonucleotide
  modified_base 12: mod_base = OTHER; note = 2'-fluoro ribonucleotide
  modified_base 13: mod_base = OTHER; note = 2'-O-Methyl ribonucleotide
  modified_base 14: mod_base = OTHER; note = 2'-fluoro ribonucleotide
  modified_base 15: mod_base = OTHER; note = 2'-O-Methyl ribonucleotide
  modified_base 16: mod_base = OTHER; note = 2'-fluoro ribonucleotide
  modified_base 17..23: mod_base = OTHER; note = 2'-O-Methyl ribonucleotide
  modified_base 1..3: mod_base = OTHER; note = phosphorothioate linkage
  modified_base 21..23: mod_base = OTHER; note = phosphorothioate linkage
ttctattcgatgttgaattaatg

SEQ ID NO: 277 - RNA, 23 nt, synthetic construct
  source 1..23: mol_type = other RNA
  modified_base 1: mod_base = OTHER; note = 2'-O-Methyl ribonucleotide
  modified_base 2: mod_base = OTHER; note = 2'-fluoro ribonucleotide
  modified_base 3..6: mod_base = OTHER; note = 2'-O-Methyl ribonucleotide
  modified_base 7: mod_base = OTHER; note = 2'-fluoro ribonucleotide
  modified_base 8..11: mod_base = OTHER; note = 2'-O-Methyl ribonucleotide
  modified_base 12: mod_base = OTHER; note = 2'-fluoro ribonucleotide
  modified_base 13: mod_base = OTHER; note = 2'-O-Methyl ribonucleotide
  modified_base 14: mod_base = OTHER; note = 2'-fluoro ribonucleotide
  modified_base 15: mod_base = OTHER; note = 2'-O-Methyl ribonucleotide
  modified_base 16: mod_base = OTHER; note = 2'-fluoro ribonucleotide
  modified_base 17..23: mod_base = OTHER; note = 2'-O-Methyl ribonucleotide
  modified_base 1..3: mod_base = OTHER; note = phosphorothioate linkage
  modified_base 21..23: mod_base = OTHER; note = phosphorothioate linkage
tatctattcgatgttgaattaat

SEQ ID NO: 278 - RNA, 23 nt, synthetic construct
  source 1..23: mol_type = other RNA
  modified_base 1: mod_base = OTHER; note = 2'-O-Methyl ribonucleotide
  modified_base 2: mod_base = OTHER; note = 2'-fluoro ribonucleotide
  modified_base 3..6: mod_base = OTHER; note = 2'-O-Methyl ribonucleotide
  modified_base 7: mod_base = OTHER; note = 2'-fluoro ribonucleotide
  modified_base 8..11: mod_base = OTHER; note = 2'-O-Methyl ribonucleotide
  modified_base 12: mod_base = OTHER; note = 2'-fluoro ribonucleotide
  modified_base 13: mod_base = OTHER; note = 2'-O-Methyl ribonucleotide
  modified_base 14: mod_base = OTHER; note = 2'-fluoro ribonucleotide
  modified_base 15: mod_base = OTHER; note = 2'-O-Methyl ribonucleotide
  modified_base 16: mod_base = OTHER; note = 2'-fluoro ribonucleotide
  modified_base 17..23: mod_base = OTHER; note = 2'-O-Methyl ribonucleotide
  modified_base 1..3: mod_base = OTHER; note = phosphorothioate linkage
  modified_base 21..23: mod_base = OTHER; note = phosphorothioate linkage
tcatctattcgatgttgaattaa

SEQ ID NO: 279 - RNA, 23 nt, synthetic construct
  source 1..23: mol_type = other RNA
  modified_base 1: mod_base = OTHER; note = 2'-O-Methyl ribonucleotide
  modified_base 2: mod_base = OTHER; note = 2'-fluoro ribonucleotide
  modified_base 3..6: mod_base = OTHER; note = 2'-O-Methyl ribonucleotide
  modified_base 7: mod_base = OTHER; note = 2'-fluoro ribonucleotide
  modified_base 8..11: mod_base = OTHER; note = 2'-O-Methyl ribonucleotide
  modified_base 12: mod_base = OTHER; note = 2'-fluoro ribonucleotide
  modified_base 13: mod_base = OTHER; note = 2'-O-Methyl ribonucleotide
  modified_base 14: mod_base = OTHER; note = 2'-fluoro ribonucleotide
  modified_base 15: mod_base = OTHER; note = 2'-O-Methyl ribonucleotide
  modified_base 16: mod_base = OTHER; note = 2'-fluoro ribonucleotide
  modified_base 17..23: mod_base = OTHER; note = 2'-O-Methyl ribonucleotide
  modified_base 1..3: mod_base = OTHER; note = phosphorothioate linkage
  modified_base 21..23: mod_base = OTHER; note = phosphorothioate linkage
tatccatctattcgatgttgaat

SEQ ID NO: 280 - RNA, 23 nt, synthetic construct
  source 1..23: mol_type = other RNA
  modified_base 1: mod_base = OTHER; note = 2'-O-Methyl ribonucleotide
  modified_base 2: mod_base = OTHER; note = 2'-fluoro ribonucleotide
  modified_base 3..6: mod_base = OTHER; note = 2'-O-Methyl ribonucleotide
  modified_base 7: mod_base = OTHER; note = 2'-fluoro ribonucleotide
  modified_base 8..11: mod_base = OTHER; note = 2'-O-Methyl ribonucleotide
  modified_base 12: mod_base = OTHER; note = 2'-fluoro ribonucleotide
  modified_base 13: mod_base = OTHER; note = 2'-O-Methyl ribonucleotide
  modified_base 14: mod_base = OTHER; note = 2'-fluoro ribonucleotide
  modified_base 15: mod_base = OTHER; note = 2'-O-Methyl ribonucleotide
  modified_base 16: mod_base = OTHER; note = 2'-fluoro ribonucleotide
  modified_base 17..23: mod_base = OTHER; note = 2'-O-Methyl ribonucleotide
  modified_base 1..3: mod_base = OTHER; note = phosphorothioate linkage
  modified_base 21..23: mod_base = OTHER; note = phosphorothioate linkage
tgatccatctattcgatgttgaa

SEQ ID NO: 281 - RNA, 23 nt, synthetic construct
  source 1..23: mol_type = other RNA
  modified_base 1: mod_base = OTHER; note = 2'-O-Methyl ribonucleotide
  modified_base 2: mod_base = OTHER; note = 2'-fluoro ribonucleotide
  modified_base 3..6: mod_base = OTHER; note = 2'-O-Methyl ribonucleotide
  modified_base 7: mod_base = OTHER; note = 2'-fluoro ribonucleotide
  modified_base 8..11: mod_base = OTHER; note = 2'-O-Methyl ribonucleotide
  modified_base 12: mod_base = OTHER; note = 2'-fluoro ribonucleotide
  modified_base 13: mod_base = OTHER; note = 2'-O-Methyl ribonucleotide
  modified_base 14: mod_base = OTHER; note = 2'-fluoro ribonucleotide
  modified_base 15: mod_base = OTHER; note = 2'-O-Methyl ribonucleotide
  modified_base 16: mod_base = OTHER; note = 2'-fluoro ribonucleotide
  modified_base 17..23: mod_base = OTHER; note = 2'-O-Methyl ribonucleotide
  modified_base 1..3: mod_base = OTHER; note = phosphorothioate linkage
  modified_base 21..23: mod_base = OTHER; note = phosphorothioate linkage
ttgatccatctattcgatgttga

SEQ ID NO: 282 - RNA, 23 nt, synthetic construct
  source 1..23: mol_type = other RNA
  modified_base 1: mod_base = OTHER; note = 2'-O-Methyl ribonucleotide
  modified_base 2: mod_base = OTHER; note = 2'-fluoro ribonucleotide
  modified_base 3..6: mod_base = OTHER; note = 2'-O-Methyl ribonucleotide
  modified_base 7: mod_base = OTHER; note = 2'-fluoro ribonucleotide
  modified_base 8..11: mod_base = OTHER; note = 2'-O-Methyl ribonucleotide
  modified_base 12: mod_base = OTHER; note = 2'-fluoro ribonucleotide
  modified_base 13: mod_base = OTHER; note = 2'-O-Methyl ribonucleotide
  modified_base 14: mod_base = OTHER; note = 2'-fluoro ribonucleotide
  modified_base 15: mod_base = OTHER; note = 2'-O-Methyl ribonucleotide
  modified_base 16: mod_base = OTHER; note = 2'-fluoro ribonucleotide
  modified_base 17..23: mod_base = OTHER; note = 2'-O-Methyl ribonucleotide
  modified_base 1..3: mod_base = OTHER; note = phosphorothioate linkage
  modified_base 21..23: mod_base = OTHER; note = phosphorothioate linkage
tgtgatccatctattcgatgttg

SEQ ID NO: 283 - RNA, 23 nt, synthetic construct
  source 1..23: mol_type = other RNA
  modified_base 1: mod_base = OTHER; note = 2'-O-Methyl ribonucleotide
  modified_base 2: mod_base = OTHER; note = 2'-fluoro ribonucleotide
  modified_base 3..6: mod_base = OTHER; note = 2'-O-Methyl ribonucleotide
  modified_base 7: mod_base = OTHER; note = 2'-fluoro ribonucleotide
  modified_base 8..11: mod_base = OTHER; note = 2'-O-Methyl ribonucleotide
  modified_base 12: mod_base = OTHER; note = 2'-fluoro ribonucleotide
  modified_base 13: mod_base = OTHER; note = 2'-O-Methyl ribonucleotide
  modified_base 14: mod_base = OTHER; note = 2'-fluoro ribonucleotide
  modified_base 15: mod_base = OTHER; note = 2'-O-Methyl ribonucleotide
  modified_base 16: mod_base = OTHER; note = 2'-fluoro ribonucleotide
  modified_base 17..23: mod_base = OTHER; note = 2'-O-Methyl ribonucleotide
  modified_base 1..3: mod_base = OTHER; note = phosphorothioate linkage
  modified_base 21..23: mod_base = OTHER; note = phosphorothioate linkage
ttttgtgatccatctattcgatg

SEQ ID NO: 284 - RNA, 23 nt, synthetic construct
  source 1..23: mol_type = other RNA
  modified_base 1: mod_base = OTHER; note = 2'-O-Methyl ribonucleotide
  modified_base 2: mod_base = OTHER; note = 2'-fluoro ribonucleotide
  modified_base 3..6: mod_base = OTHER; note = 2'-O-Methyl ribonucleotide
  modified_base 7: mod_base = OTHER; note = 2'-fluoro ribonucleotide
  modified_base 8..11: mod_base = OTHER; note = 2'-O-Methyl ribonucleotide
  modified_base 12: mod_base = OTHER; note = 2'-fluoro ribonucleotide
  modified_base 13: mod_base = OTHER; note = 2'-O-Methyl ribonucleotide
  modified_base 14: mod_base = OTHER; note = 2'-fluoro ribonucleotide
  modified_base 15: mod_base = OTHER; note = 2'-O-Methyl ribonucleotide
  modified_base 16: mod_base = OTHER; note = 2'-fluoro ribonucleotide
  modified_base 17..23: mod_base = OTHER; note = 2'-O-Methyl ribonucleotide
  modified_base 1..3: mod_base = OTHER; note = phosphorothioate linkage
  modified_base 21..23: mod_base = OTHER; note = phosphorothioate linkage
taagttttgtgatccatctattc

SEQ ID NO: 285 - RNA, 23 nt, synthetic construct
  source 1..23: mol_type = other RNA
  modified_base 1: mod_base = OTHER; note = 2'-O-Methyl ribonucleotide
  modified_base 2: mod_base = OTHER; note = 2'-fluoro ribonucleotide
  modified_base 3..6: mod_base = OTHER; note = 2'-O-Methyl ribonucleotide
  modified_base 7: mod_base = OTHER; note = 2'-fluoro ribonucleotide
  modified_base 8..11: mod_base = OTHER; note = 2'-O-Methyl ribonucleotide
  modified_base 12: mod_base = OTHER; note = 2'-fluoro ribonucleotide
  modified_base 13: mod_base = OTHER; note = 2'-O-Methyl ribonucleotide
  modified_base 14: mod_base = OTHER; note = 2'-fluoro ribonucleotide
  modified_base 15: mod_base = OTHER; note = 2'-O-Methyl ribonucleotide
  modified_base 16: mod_base = OTHER; note = 2'-fluoro ribonucleotide
  modified_base 17..23: mod_base = OTHER; note = 2'-O-Methyl ribonucleotide
  modified_base 1..3: mod_base = OTHER; note = phosphorothioate linkage
  modified_base 21..23: mod_base = OTHER; note = phosphorothioate linkage
tttgaagttttgtgatccatcta

SEQ ID NO: 286 - RNA, 23 nt, synthetic construct
  source 1..23: mol_type = other RNA
  modified_base 1: mod_base = OTHER; note = 2'-O-Methyl ribonucleotide
  modified_base 2: mod_base = OTHER; note = 2'-fluoro ribonucleotide
  modified_base 3..6: mod_base = OTHER; note = 2'-O-Methyl ribonucleotide
  modified_base 7: mod_base = OTHER; note = 2'-fluoro ribonucleotide
  modified_base 8..11: mod_base = OTHER; note = 2'-O-Methyl ribonucleotide
  modified_base 12: mod_base = OTHER; note = 2'-fluoro ribonucleotide
  modified_base 13: mod_base = OTHER; note = 2'-O-Methyl ribonucleotide
  modified_base 14: mod_base = OTHER; note = 2'-fluoro ribonucleotide
  modified_base 15: mod_base = OTHER; note = 2'-O-Methyl ribonucleotide
  modified_base 16: mod_base = OTHER; note = 2'-fluoro ribonucleotide
  modified_base 17..23: mod_base = OTHER; note = 2'-O-Methyl ribonucleotide
  modified_base 1..3: mod_base = OTHER; note = phosphorothioate linkage
  modified_base 21..23: mod_base = OTHER; note = phosphorothioate linkage
tacgtttcattgaagttttgtga

SEQ ID NO: 287 - RNA, 23 nt, synthetic construct
  source 1..23: mol_type = other RNA
  modified_base 1: mod_base = OTHER; note = 2'-O-Methyl ribonucleotide
  modified_base 2: mod_base = OTHER; note = 2'-fluoro ribonucleotide
  modified_base 3..6: mod_base = OTHER; note = 2'-O-Methyl ribonucleotide
  modified_base 7: mod_base = OTHER; note = 2'-fluoro ribonucleotide
  modified_base 8..11: mod_base = OTHER; note = 2'-O-Methyl ribonucleotide
  modified_base 12: mod_base = OTHER; note = 2'-fluoro ribonucleotide
  modified_base 13: mod_base = OTHER; note = 2'-O-Methyl ribonucleotide
  modified_base 14: mod_base = OTHER; note = 2'-fluoro ribonucleotide
  modified_base 15: mod_base = OTHER; note = 2'-O-Methyl ribonucleotide
  modified_base 16: mod_base = OTHER; note = 2'-fluoro ribonucleotide
  modified_base 17..23: mod_base = OTHER; note = 2'-O-Methyl ribonucleotide
  modified_base 1..3: mod_base = OTHER; note = phosphorothioate linkage
  modified_base 21..23: mod_base = OTHER; note = phosphorothioate linkage
tccacgtttcattgaagttttgt

SEQ ID NO: 288 - RNA, 23 nt, synthetic construct
  source 1..23: mol_type = other RNA
  modified_base 1: mod_base = OTHER; note = 2'-O-Methyl ribonucleotide
  modified_base 2: mod_base = OTHER; note = 2'-fluoro ribonucleotide
  modified_base 3..6: mod_base = OTHER; note = 2'-O-Methyl ribonucleotide
  modified_base 7: mod_base = OTHER; note = 2'-fluoro ribonucleotide
  modified_base 8..11: mod_base = OTHER; note = 2'-O-Methyl ribonucleotide
  modified_base 12: mod_base = OTHER; note = 2'-fluoro ribonucleotide
  modified_base 13: mod_base = OTHER; note = 2'-O-Methyl ribonucleotide
  modified_base 14: mod_base = OTHER; note = 2'-fluoro ribonucleotide
  modified_base 15: mod_base = OTHER; note = 2'-O-Methyl ribonucleotide
  modified_base 16: mod_base = OTHER; note = 2'-fluoro ribonucleotide
  modified_base 17..23: mod_base = OTHER; note = 2'-O-Methyl ribonucleotide
  modified_base 1..3: mod_base = OTHER; note = phosphorothioate linkage
  modified_base 21..23: mod_base = OTHER; note = phosphorothioate linkage
tcccacgtttcattgaagttttg

SEQ ID NO: 289 - RNA, 23 nt, synthetic construct
  source 1..23: mol_type = other RNA
  modified_base 1: mod_base = OTHER; note = 2'-O-Methyl ribonucleotide
  modified_base 2: mod_base = OTHER; note = 2'-fluoro ribonucleotide
  modified_base 3..6: mod_base = OTHER; note = 2'-O-Methyl ribonucleotide
  modified_base 7: mod_base = OTHER; note = 2'-fluoro ribonucleotide
  modified_base 8..11: mod_base = OTHER; note = 2'-O-Methyl ribonucleotide
  modified_base 12: mod_base = OTHER; note = 2'-fluoro ribonucleotide
  modified_base 13: mod_base = OTHER; note = 2'-O-Methyl ribonucleotide
  modified_base 14: mod_base = OTHER; note = 2'-fluoro ribonucleotide
  modified_base 15: mod_base = OTHER; note = 2'-O-Methyl ribonucleotide
  modified_base 16: mod_base = OTHER; note = 2'-fluoro ribonucleotide
  modified_base 17..23: mod_base = OTHER; note = 2'-O-Methyl ribonucleotide
  modified_base 1..3: mod_base = OTHER; note = phosphorothioate linkage
  modified_base 21..23: mod_base = OTHER; note = phosphorothioate linkage
ttctcccacgtttcattgaagtt

SEQ ID NO: 290 - RNA, 23 nt, synthetic construct
  source 1..23: mol_type = other RNA
  modified_base 1: mod_base = OTHER; note = 2'-O-Methyl ribonucleotide
  modified_base 2: mod_base = OTHER; note = 2'-fluoro ribonucleotide
  modified_base 3..6: mod_base = OTHER; note = 2'-O-Methyl ribonucleotide
  modified_base 7: mod_base = OTHER; note = 2'-fluoro ribonucleotide
  modified_base 8..11: mod_base = OTHER; note = 2'-O-Methyl ribonucleotide
  modified_base 12: mod_base = OTHER; note = 2'-fluoro ribonucleotide
  modified_base 13: mod_base = OTHER; note = 2'-O-Methyl ribonucleotide
  modified_base 14: mod_base = OTHER; note = 2'-fluoro ribonucleotide
  modified_base 15: mod_base = OTHER; note = 2'-O-Methyl ribonucleotide
  modified_base 16: mod_base = OTHER; note = 2'-fluoro ribonucleotide
  modified_base 17..23: mod_base = OTHER; note = 2'-O-Methyl ribonucleotide
  modified_base 1..3: mod_base = OTHER; note = phosphorothioate linkage
  modified_base 21..23: mod_base = OTHER; note = phosphorothioate linkage
tttctcccacgtttcattgaagt

SEQ ID NO: 291 - RNA, 23 nt, synthetic construct
  source 1..23: mol_type = other RNA
  modified_base 1: mod_base = OTHER; note = 2'-O-Methyl ribonucleotide
  modified_base 2: mod_base = OTHER; note = 2'-fluoro ribonucleotide
  modified_base 3..6: mod_base = OTHER; note = 2'-O-Methyl ribonucleotide
  modified_base 7: mod_base = OTHER; note = 2'-fluoro ribonucleotide
  modified_base 8..11: mod_base = OTHER; note = 2'-O-Methyl ribonucleotide
  modified_base 12: mod_base = OTHER; note = 2'-fluoro ribonucleotide
  modified_base 13: mod_base = OTHER; note = 2'-O-Methyl ribonucleotide
  modified_base 14: mod_base = OTHER; note = 2'-fluoro ribonucleotide
  modified_base 15: mod_base = OTHER; note = 2'-O-Methyl ribonucleotide
  modified_base 16: mod_base = OTHER; note = 2'-fluoro ribonucleotide
  modified_base 17..23: mod_base = OTHER; note = 2'-O-Methyl ribonucleotide
  modified_base 1..3: mod_base = OTHER; note = phosphorothioate linkage
  modified_base 21..23: mod_base = OTHER; note = phosphorothioate linkage
tgttctcccacgtttcattgaag

SEQ ID NO: 292 - RNA, 23 nt, synthetic construct
  source 1..23: mol_type = other RNA
  modified_base 1: mod_base = OTHER; note = 2'-O-Methyl ribonucleotide
  modified_base 2: mod_base = OTHER; note = 2'-fluoro ribonucleotide
  modified_base 3..6: mod_base = OTHER; note = 2'-O-Methyl ribonucleotide
  modified_base 7: mod_base = OTHER; note = 2'-fluoro ribonucleotide
  modified_base 8..11: mod_base = OTHER; note = 2'-O-Methyl ribonucleotide
  modified_base 12: mod_base = OTHER; note = 2'-fluoro ribonucleotide
  modified_base 13: mod_base = OTHER; note = 2'-O-Methyl ribonucleotide
  modified_base 14: mod_base = OTHER; note = 2'-fluoro ribonucleotide
  modified_base 15: mod_base = OTHER; note = 2'-O-Methyl ribonucleotide
  modified_base 16: mod_base = OTHER; note = 2'-fluoro ribonucleotide
  modified_base 17..23: mod_base = OTHER; note = 2'-O-Methyl ribonucleotide
  modified_base 1..3: mod_base = OTHER; note = phosphorothioate linkage
  modified_base 21..23: mod_base = OTHER; note = phosphorothioate linkage
ttagttctcccacgtttcattga

SEQ ID NO: 293 - RNA, 23 nt, synthetic construct
  source 1..23: mol_type = other RNA
  modified_base 1: mod_base = OTHER; note = 2'-O-Methyl ribonucleotide
  modified_base 2: mod_base = OTHER; note = 2'-fluoro ribonucleotide
  modified_base 3..6: mod_base = OTHER; note = 2'-O-Methyl ribonucleotide
  modified_base 7: mod_base = OTHER; note = 2'-fluoro ribonucleotide
  modified_base 8..11: mod_base = OTHER; note = 2'-O-Methyl ribonucleotide
  modified_base 12: mod_base = OTHER; note = 2'-fluoro ribonucleotide
  modified_base 13: mod_base = OTHER; note = 2'-O-Methyl ribonucleotide
  modified_base 14: mod_base = OTHER; note = 2'-fluoro ribonucleotide
  modified_base 15: mod_base = OTHER; note = 2'-O-Methyl ribonucleotide
  modified_base 16: mod_base = OTHER; note = 2'-fluoro ribonucleotide
  modified_base 17..23: mod_base = OTHER; note = 2'-O-Methyl ribonucleotide
  modified_base 1..3: mod_base = OTHER; note = phosphorothioate linkage
  modified_base 21..23: mod_base = OTHER; note = phosphorothioate linkage
tgtagttctcccacgtttcattg

SEQ ID NO: 294 - RNA, 23 nt, synthetic construct
  source 1..23: mol_type = other RNA
  modified_base 1: mod_base = OTHER; note = 2'-O-Methyl ribonucleotide
  modified_base 2: mod_base = OTHER; note = 2'-fluoro ribonucleotide
  modified_base 3..6: mod_base = OTHER; note = 2'-O-Methyl ribonucleotide
  modified_base 7: mod_base = OTHER; note = 2'-fluoro ribonucleotide
  modified_base 8..11: mod_base = OTHER; note = 2'-O-Methyl ribonucleotide
  modified_base 12: mod_base = OTHER; note = 2'-fluoro ribonucleotide
  modified_base 13: mod_base = OTHER; note = 2'-O-Methyl ribonucleotide
  modified_base 14: mod_base = OTHER; note = 2'-fluoro ribonucleotide
  modified_base 15: mod_base = OTHER; note = 2'-O-Methyl ribonucleotide
  modified_base 16: mod_base = OTHER; note = 2'-fluoro ribonucleotide
  modified_base 17..23: mod_base = OTHER; note = 2'-O-Methyl ribonucleotide
  modified_base 1..3: mod_base = OTHER; note = phosphorothioate linkage
  modified_base 21..23: mod_base = OTHER; note = phosphorothioate linkage
tttgtagttctcccacgtttcat

SEQ ID NO: 295 - RNA, 23 nt, synthetic construct
  source 1..23: mol_type = other RNA
  modified_base 1: mod_base = OTHER; note = 2'-O-Methyl ribonucleotide
  modified_base 2: mod_base = OTHER; note = 2'-fluoro ribonucleotide
  modified_base 3..6: mod_base = OTHER; note = 2'-O-Methyl ribonucleotide
  modified_base 7: mod_base = OTHER; note = 2'-fluoro ribonucleotide
  modified_base 8..11: mod_base = OTHER; note = 2'-O-Methyl ribonucleotide
  modified_base 12: mod_base = OTHER; note = 2'-fluoro ribonucleotide
  modified_base 13: mod_base = OTHER; note = 2'-O-Methyl ribonucleotide
  modified_base 14: mod_base = OTHER; note = 2'-fluoro ribonucleotide
  modified_base 15: mod_base = OTHER; note = 2'-O-Methyl ribonucleotide
  modified_base 16: mod_base = OTHER; note = 2'-fluoro ribonucleotide
  modified_base 17..23: mod_base = OTHER; note = 2'-O-Methyl ribonucleotide
  modified_base 1..3: mod_base = OTHER; note = phosphorothioate linkage
  modified_base 21..23: mod_base = OTHER; note = phosphorothioate linkage
ttttgtagttctcccacgtttca

SEQ ID NO: 296 - RNA, 23 nt, synthetic construct
  source 1..23: mol_type = other RNA
  modified_base 1: mod_base = OTHER; note = 2'-O-Methyl ribonucleotide
  modified_base 2: mod_base = OTHER; note = 2'-fluoro ribonucleotide
  modified_base 3..6: mod_base = OTHER; note = 2'-O-Methyl ribonucleotide
  modified_base 7: mod_base = OTHER; note = 2'-fluoro ribonucleotide
  modified_base 8..11: mod_base = OTHER; note = 2'-O-Methyl ribonucleotide
  modified_base 12: mod_base = OTHER; note = 2'-fluoro ribonucleotide
  modified_base 13: mod_base = OTHER; note = 2'-O-Methyl ribonucleotide
  modified_base 14: mod_base = OTHER; note = 2'-fluoro ribonucleotide
  modified_base 15: mod_base = OTHER; note = 2'-O-Methyl ribonucleotide
  modified_base 16: mod_base = OTHER; note = 2'-fluoro ribonucleotide
  modified_base 17..23: mod_base = OTHER; note = 2'-O-Methyl ribonucleotide
  modified_base 1..3: mod_base = OTHER; note = phosphorothioate linkage
  modified_base 21..23: mod_base = OTHER; note = phosphorothioate linkage
tccatatttgtagttctcccacg

SEQ ID NO: 297 - RNA, 23 nt, synthetic construct
  source 1..23: mol_type = other RNA
  modified_base 1: mod_base = OTHER; note = 2'-O-Methyl ribonucleotide
  modified_base 2: mod_base = OTHER; note = 2'-fluoro ribonucleotide
  modified_base 3..6: mod_base = OTHER; note = 2'-O-Methyl ribonucleotide
  modified_base 7: mod_base = OTHER; note = 2'-fluoro ribonucleotide
  modified_base 8..11: mod_base = OTHER; note = 2'-O-Methyl ribonucleotide
  modified_base 12: mod_base = OTHER; note = 2'-fluoro ribonucleotide
  modified_base 13: mod_base = OTHER; note = 2'-O-Methyl ribonucleotide
  modified_base 14: mod_base = OTHER; note = 2'-fluoro ribonucleotide
  modified_base 15: mod_base = OTHER; note = 2'-O-Methyl ribonucleotide
  modified_base 16: mod_base = OTHER; note = 2'-fluoro ribonucleotide
  modified_base 17..23: mod_base = OTHER; note = 2'-O-Methyl ribonucleotide
  modified_base 1..3: mod_base = OTHER; note = phosphorothioate linkage
  modified_base 21..23: mod_base = OTHER; note = phosphorothioate linkage
tattctccatcaagcctcccaaa

SEQ ID NO: 298 - RNA, 23 nt, synthetic construct
  source 1..23: mol_type = other RNA
  modified_base 1: mod_base = OTHER; note = 2'-O-Methyl ribonucleotide
  modified_base 2: mod_base = OTHER; note = 2'-fluoro ribonucleotide
  modified_base 3..6: mod_base = OTHER; note = 2'-O-Methyl ribonucleotide
  modified_base 7: mod_base = OTHER; note = 2'-fluoro ribonucleotide
  modified_base 8..11: mod_base = OTHER; note = 2'-O-Methyl ribonucleotide
  modified_base 12: mod_base = OTHER; note = 2'-fluoro ribonucleotide
  modified_base 13: mod_base = OTHER; note = 2'-O-Methyl ribonucleotide
  modified_base 14: mod_base = OTHER; note = 2'-fluoro ribonucleotide
  modified_base 15: mod_base = OTHER; note = 2'-O-Methyl ribonucleotide
  modified_base 16: mod_base = OTHER; note = 2'-fluoro ribonucleotide
  modified_base 17..23: mod_base = OTHER; note = 2'-O-Methyl ribonucleotide
  modified_base 1..3: mod_base = OTHER; note = phosphorothioate linkage
  modified_base 21..23: mod_base = OTHER; note = phosphorothioate linkage
taattctccatcaagcctcccaa

SEQ ID NO: 299 - RNA, 23 nt, synthetic construct
  source 1..23: mol_type = other RNA
  modified_base 1: mod_base = OTHER; note = 2'-O-Methyl ribonucleotide
  modified_base 2: mod_base = OTHER; note = 2'-fluoro ribonucleotide
  modified_base 3..6: mod_base = OTHER; note = 2'-O-Methyl ribonucleotide
  modified_base 7: mod_base = OTHER; note = 2'-fluoro ribonucleotide
  modified_base 8..11: mod_base = OTHER; note = 2'-O-Methyl ribonucleotide
  modified_base 12: mod_base = OTHER; note = 2'-fluoro ribonucleotide
  modified_base 13: mod_base = OTHER; note = 2'-O-Methyl ribonucleotide
  modified_base 14: mod_base = OTHER; note = 2'-fluoro ribonucleotide
  modified_base 15: mod_base = OTHER; note = 2'-O-Methyl ribonucleotide
  modified_base 16: mod_base = OTHER; note = 2'-fluoro ribonucleotide
  modified_base 17..23: mod_base = OTHER; note = 2'-O-Methyl ribonucleotide
  modified_base 1..3: mod_base = OTHER; note = phosphorothioate linkage
  modified_base 21..23: mod_base = OTHER; note = phosphorothioate linkage
tagtatatcttctctaggcccaa

SEQ ID NO: 300 - RNA, 23 nt, synthetic construct
  source 1..23: mol_type = other RNA
  modified_base 1: mod_base = OTHER; note = 2'-O-Methyl ribonucleotide
  modified_base 2: mod_base = OTHER; note = 2'-fluoro ribonucleotide
  modified_base 3..6: mod_base = OTHER; note = 2'-O-Methyl ribonucleotide
  modified_base 7: mod_base = OTHER; note = 2'-fluoro ribonucleotide
  modified_base 8..11: mod_base = OTHER; note = 2'-O-Methyl ribonucleotide
  modified_base 12: mod_base = OTHER; note = 2'-fluoro ribonucleotide
  modified_base 13: mod_base = OTHER; note = 2'-O-Methyl ribonucleotide
  modified_base 14: mod_base = OTHER; note = 2'-fluoro ribonucleotide
  modified_base 15: mod_base = OTHER; note = 2'-O-Methyl ribonucleotide
  modified_base 16: mod_base = OTHER; note = 2'-fluoro ribonucleotide
  modified_base 17..23: mod_base = OTHER; note = 2'-O-Methyl ribonucleotide
  modified_base 1..3: mod_base = OTHER; note = phosphorothioate linkage
  modified_base 21..23: mod_base = OTHER; note = phosphorothioate linkage
tggagtatatcttctctaggccc

SEQ ID NO: 301 - RNA, 23 nt, synthetic construct
  source 1..23: mol_type = other RNA
  modified_base 1: mod_base = OTHER; note = 2'-O-Methyl ribonucleotide
  modified_base 2: mod_base = OTHER; note = 2'-fluoro ribonucleotide
  modified_base 3..6: mod_base = OTHER; note = 2'-O-Methyl ribonucleotide
  modified_base 7: mod_base = OTHER; note = 2'-fluoro ribonucleotide
  modified_base 8..11: mod_base = OTHER; note = 2'-O-Methyl ribonucleotide
  modified_base 12: mod_base = OTHER; note = 2'-fluoro ribonucleotide
  modified_base 13: mod_base = OTHER; note = 2'-O-Methyl ribonucleotide
  modified_base 14: mod_base = OTHER; note = 2'-fluoro ribonucleotide
  modified_base 15: mod_base = OTHER; note = 2'-O-Methyl ribonucleotide
  modified_base 16: mod_base = OTHER; note = 2'-fluoro ribonucleotide
  modified_base 17..23: mod_base = OTHER; note = 2'-O-Methyl ribonucleotide
  modified_base 1..3: mod_base = OTHER; note = phosphorothioate linkage
  modified_base 21..23: mod_base = OTHER; note = phosphorothioate linkage
tctatggagtatatcttctctag

SEQ ID NO: 302 - RNA, 23 nt, synthetic construct
  source 1..23: mol_type = other RNA
  modified_base 1: mod_base = OTHER; note = 2'-O-Methyl ribonucleotide
  modified_base 2: mod_base = OTHER; note = 2'-fluoro ribonucleotide
  modified_base 3..6: mod_base = OTHER; note = 2'-O-Methyl ribonucleotide
  modified_base 7: mod_base = OTHER; note = 2'-fluoro ribonucleotide
  modified_base 8..11: mod_base = OTHER; note = 2'-O-Methyl ribonucleotide
  modified_base 12: mod_base = OTHER; note = 2'-fluoro ribonucleotide
  modified_base 13: mod_base = OTHER; note = 2'-O-Methyl ribonucleotide
  modified_base 14: mod_base = OTHER; note = 2'-fluoro ribonucleotide
  modified_base 15: mod_base = OTHER; note = 2'-O-Methyl ribonucleotide
  modified_base 16: mod_base = OTHER; note = 2'-fluoro ribonucleotide
  modified_base 17..23: mod_base = OTHER; note = 2'-O-Methyl ribonucleotide
  modified_base 1..3: mod_base = OTHER; note = phosphorothioate linkage
  modified_base 21..23: mod_base = OTHER; note = phosphorothioate linkage
tactatggagtatatcttctcta

SEQ ID NO: 303 - RNA, 23 nt, synthetic construct
  source 1..23: mol_type = other RNA
  modified_base 1: mod_base = OTHER; note = 2'-O-Methyl ribonucleotide
  modified_base 2: mod_base = OTHER; note = 2'-fluoro ribonucleotide
  modified_base 3..6: mod_base = OTHER; note = 2'-O-Methyl ribonucleotide
  modified_base 7: mod_base = OTHER; note = 2'-fluoro ribonucleotide
  modified_base 8..11: mod_base = OTHER; note = 2'-O-Methyl ribonucleotide
  modified_base 12: mod_base = OTHER; note = 2'-fluoro ribonucleotide
  modified_base 13: mod_base = OTHER; note = 2'-O-Methyl ribonucleotide
  modified_base 14: mod_base = OTHER; note = 2'-fluoro ribonucleotide
  modified_base 15: mod_base = OTHER; note = 2'-O-Methyl ribonucleotide
  modified_base 16: mod_base = OTHER; note = 2'-fluoro ribonucleotide
  modified_base 17..23: mod_base = OTHER; note = 2'-O-Methyl ribonucleotide
  modified_base 1..3: mod_base = OTHER; note = phosphorothioate linkage
  modified_base 21..23: mod_base = OTHER; note = phosphorothioate linkage
tcactatggagtatatcttctct

SEQ ID NO: 304 - RNA, 23 nt, synthetic construct
  source 1..23: mol_type = other RNA
  modified_base 1: mod_base = OTHER; note = 2'-O-Methyl ribonucleotide
  modified_base 2: mod_base = OTHER; note = 2'-fluoro ribonucleotide
  modified_base 3..6: mod_base = OTHER; note = 2'-O-Methyl ribonucleotide
  modified_base 7: mod_base = OTHER; note = 2'-fluoro ribonucleotide
  modified_base 8..11: mod_base = OTHER; note = 2'-O-Methyl ribonucleotide
  modified_base 12: mod_base = OTHER; note = 2'-fluoro ribonucleotide
  modified_base 13: mod_base = OTHER; note = 2'-O-Methyl ribonucleotide
  modified_base 14: mod_base = OTHER; note = 2'-fluoro ribonucleotide
  modified_base 15: mod_base = OTHER; note = 2'-O-Methyl ribonucleotide
  modified_base 16: mod_base = OTHER; note = 2'-fluoro ribonucleotide
  modified_base 17..23: mod_base = OTHER; note = 2'-O-Methyl ribonucleotide
  modified_base 1..3: mod_base = OTHER; note = phosphorothioate linkage
  modified_base 21..23: mod_base = OTHER; note = phosphorothioate linkage
ttcactatggagtatatcttctc

SEQ ID NO: 305 - RNA, 23 nt, synthetic construct
  source 1..23: mol_type = other RNA
  modified_base 1: mod_base = OTHER; note = 2'-O-Methyl ribonucleotide
  modified_base 2: mod_base = OTHER; note = 2'-fluoro ribonucleotide
  modified_base 3..6: mod_base = OTHER; note = 2'-O-Methyl ribonucleotide
  modified_base 7: mod_base = OTHER; note = 2'-fluoro ribonucleotide
  modified_base 8..11: mod_base = OTHER; note = 2'-O-Methyl ribonucleotide
  modified_base 12: mod_base = OTHER; note = 2'-fluoro ribonucleotide
  modified_base 13: mod_base = OTHER; note = 2'-O-Methyl ribonucleotide
  modified_base 14: mod_base = OTHER; note = 2'-fluoro ribonucleotide
  modified_base 15: mod_base = OTHER; note = 2'-O-Methyl ribonucleotide
  modified_base 16: mod_base = OTHER; note = 2'-fluoro ribonucleotide
  modified_base 17..23: mod_base = OTHER; note = 2'-O-Methyl ribonucleotide
  modified_base 1..3: mod_base = OTHER; note = phosphorothioate linkage
  modified_base 21..23: mod_base = OTHER; note = phosphorothioate linkage
tttcactatggagtatatcttct

SEQ ID NO: 306 - RNA, 23 nt, synthetic construct
  source 1..23: mol_type = other RNA
  modified_base 1: mod_base = OTHER; note = 2'-O-Methyl ribonucleotide
  modified_base 2: mod_base = OTHER; note = 2'-fluoro ribonucleotide
  modified_base 3..6: mod_base = OTHER; note = 2'-O-Methyl ribonucleotide
  modified_base 7: mod_base = OTHER; note = 2'-fluoro ribonucleotide
  modified_base 8..11: mod_base = OTHER; note = 2'-O-Methyl ribonucleotide
  modified_base 12: mod_base = OTHER; note = 2'-fluoro ribonucleotide
  modified_base 13: mod_base = OTHER; note = 2'-O-Methyl ribonucleotide
  modified_base 14: mod_base = OTHER; note = 2'-fluoro ribonucleotide
  modified_base 15: mod_base = OTHER; note = 2'-O-Methyl ribonucleotide
  modified_base 16: mod_base = OTHER; note = 2'-fluoro ribonucleotide
  modified_base 17..23: mod_base = OTHER; note = 2'-O-Methyl ribonucleotide
  modified_base 1..3: mod_base = OTHER; note = phosphorothioate linkage
  modified_base 21..23: mod_base = OTHER; note = phosphorothioate linkage
tttgcttcactatggagtatatc

SEQ ID NO: 307 - RNA, 23 nt, synthetic construct
  source 1..23: mol_type = other RNA
  modified_base 1: mod_base = OTHER; note = 2'-O-Methyl ribonucleotide
  modified_base 2: mod_base = OTHER; note = 2'-fluoro ribonucleotide
  modified_base 3..6: mod_base = OTHER; note = 2'-O-Methyl ribonucleotide
  modified_base 7: mod_base = OTHER; note = 2'-fluoro ribonucleotide
  modified_base 8..11: mod_base = OTHER; note = 2'-O-Methyl ribonucleotide
  modified_base 12: mod_base = OTHER; note = 2'-fluoro ribonucleotide
  modified_base 13: mod_base = OTHER; note = 2'-O-Methyl ribonucleotide
  modified_base 14: mod_base = OTHER; note = 2'-fluoro ribonucleotide
  modified_base 15: mod_base = OTHER; note = 2'-O-Methyl ribonucleotide
  modified_base 16: mod_base = OTHER; note = 2'-fluoro ribonucleotide
  modified_base 17..23: mod_base = OTHER; note = 2'-O-Methyl ribonucleotide
  modified_base 1..3: mod_base = OTHER; note = phosphorothioate linkage
  modified_base 21..23: mod_base = OTHER; note = phosphorothioate linkage
tattgcttcactatggagtatat

SEQ ID NO: 308 - RNA, 23 nt, synthetic construct
  source 1..23: mol_type = other RNA
  modified_base 1: mod_base = OTHER; note = 2'-O-Methyl ribonucleotide
  modified_base 2: mod_base = OTHER; note = 2'-fluoro ribonucleotide
  modified_base 3..6: mod_base = OTHER; note = 2'-O-Methyl ribonucleotide
  modified_base 7: mod_base = OTHER; note = 2'-fluoro ribonucleotide
  modified_base 8..11: mod_base = OTHER; note = 2'-O-Methyl ribonucleotide
  modified_base 12: mod_base = OTHER; note = 2'-fluoro ribonucleotide
  modified_base 13: mod_base = OTHER; note = 2'-O-Methyl ribonucleotide
  modified_base 14: mod_base = OTHER; note = 2'-fluoro ribonucleotide
  modified_base 15: mod_base = OTHER; note = 2'-O-Methyl ribonucleotide
  modified_base 16: mod_base = OTHER; note = 2'-fluoro ribonucleotide
  modified_base 17..23: mod_base = OTHER; note = 2'-O-Methyl ribonucleotide
  modified_base 1..3: mod_base = OTHER; note = phosphorothioate linkage
  modified_base 21..23: mod_base = OTHER; note = phosphorothioate linkage
tattagattgcttcactatggag

SEQ ID NO: 309 - RNA, 23 nt, synthetic construct
  source 1..23: mol_type = other RNA
  modified_base 1: mod_base = OTHER; note = 2'-O-Methyl ribonucleotide
  modified_base 2: mod_base = OTHER; note = 2'-fluoro ribonucleotide
  modified_base 3..6: mod_base = OTHER; note = 2'-O-Methyl ribonucleotide
  modified_base 7: mod_base = OTHER; note = 2'-fluoro ribonucleotide
  modified_base 8..11: mod_base = OTHER; note = 2'-O-Methyl ribonucleotide
  modified_base 12: mod_base = OTHER; note = 2'-fluoro ribonucleotide
  modified_base 13: mod_base = OTHER; note = 2'-O-Methyl ribonucleotide
  modified_base 14: mod_base = OTHER; note = 2'-fluoro ribonucleotide
  modified_base 15: mod_base = OTHER; note = 2'-O-Methyl ribonucleotide
  modified_base 16: mod_base = OTHER; note = 2'-fluoro ribonucleotide
  modified_base 17..23: mod_base = OTHER; note = 2'-O-Methyl ribonucleotide
  modified_base 1..3: mod_base = OTHER; note = phosphorothioate linkage
  modified_base 21..23: mod_base = OTHER; note = phosphorothioate linkage
ttaattagattgcttcactatgg

SEQ ID NO: 310 - RNA, 23 nt, synthetic construct
  source 1..23: mol_type = other RNA
  modified_base 1: mod_base = OTHER; note = 2'-O-Methyl ribonucleotide
  modified_base 2: mod_base = OTHER; note = 2'-fluoro ribonucleotide
  modified_base 3..6: mod_base = OTHER; note = 2'-O-Methyl ribonucleotide
  modified_base 7: mod_base = OTHER; note = 2'-fluoro ribonucleotide
  modified_base 8..11: mod_base = OTHER; note = 2'-O-Methyl ribonucleotide
  modified_base 12: mod_base = OTHER; note = 2'-fluoro ribonucleotide
  modified_base 13: mod_base = OTHER; note = 2'-O-Methyl ribonucleotide
  modified_base 14: mod_base = OTHER; note = 2'-fluoro ribonucleotide
  modified_base 15: mod_base = OTHER; note = 2'-O-Methyl ribonucleotide
  modified_base 16: mod_base = OTHER; note = 2'-fluoro ribonucleotide
  modified_base 17..23: mod_base = OTHER; note = 2'-O-Methyl ribonucleotide
  modified_base 1..3: mod_base = OTHER; note = phosphorothioate linkage
  modified_base 21..23: mod_base = OTHER; note = phosphorothioate linkage
ttcgtgatttcccaagtaaaaag

SEQ ID NO: 311 - RNA, 23 nt, synthetic construct
  source 1..23: mol_type = other RNA
  modified_base 1: mod_base = OTHER; note = 2'-O-Methyl ribonucleotide
  modified_base 2: mod_base = OTHER; note = 2'-fluoro ribonucleotide
  modified_base 3..6: mod_base = OTHER; note = 2'-O-Methyl ribonucleotide
  modified_base 7: mod_base = OTHER; note = 2'-fluoro ribonucleotide
  modified_base 8..11: mod_base = OTHER; note = 2'-O-Methyl ribonucleotide
  modified_base 12: mod_base = OTHER; note = 2'-fluoro ribonucleotide
  modified_base 13: mod_base = OTHER; note = 2'-O-Methyl ribonucleotide
  modified_base 14: mod_base = OTHER; note = 2'-fluoro ribonucleotide
  modified_base 15: mod_base = OTHER; note = 2'-O-Methyl ribonucleotide
  modified_base 16: mod_base = OTHER; note = 2'-fluoro ribonucleotide
  modified_base 17..23: mod_base = OTHER; note = 2'-O-Methyl ribonucleotide
  modified_base 1..3: mod_base = OTHER; note = phosphorothioate linkage
  modified_base 21..23: mod_base = OTHER; note = phosphorothioate linkage
tttggtttcgtgatttcccaagt

SEQ ID NO: 312 - RNA, 23 nt, synthetic construct
  source 1..23: mol_type = other RNA
  modified_base 1: mod_base = OTHER; note = 2'-O-Methyl ribonucleotide
  modified_base 2: mod_base = OTHER; note = 2'-fluoro ribonucleotide
  modified_base 3..6: mod_base = OTHER; note = 2'-O-Methyl ribonucleotide
  modified_base 7: mod_base = OTHER; note = 2'-fluoro ribonucleotide
  modified_base 8..11: mod_base = OTHER; note = 2'-O-Methyl ribonucleotide
  modified_base 12: mod_base = OTHER; note = 2'-fluoro ribonucleotide
  modified_base 13: mod_base = OTHER; note = 2'-O-Methyl ribonucleotide
  modified_base 14: mod_base = OTHER; note = 2'-fluoro ribonucleotide
  modified_base 15: mod_base = OTHER; note = 2'-O-Methyl ribonucleotide
  modified_base 16: mod_base = OTHER; note = 2'-fluoro ribonucleotide
  modified_base 17..23: mod_base = OTHER; note = 2'-O-Methyl ribonucleotide
  modified_base 1..3: mod_base = OTHER; note = phosphorothioate linkage
  modified_base 21..23: mod_base = OTHER; note = phosphorothioate linkage
tagttggtttcgtgatttcccaa

SEQ ID NO: 313 - RNA, 23 nt, synthetic construct
  source 1..23: mol_type = other RNA
  modified_base 1: mod_base = OTHER; note = 2'-O-Methyl ribonucleotide
  modified_base 2: mod_base = OTHER; note = 2'-fluoro ribonucleotide
  modified_base 3..6: mod_base = OTHER; note = 2'-O-Methyl ribonucleotide
  modified_base 7: mod_base = OTHER; note = 2'-fluoro ribonucleotide
  modified_base 8..11: mod_base = OTHER; note = 2'-O-Methyl ribonucleotide
  modified_base 12: mod_base = OTHER; note = 2'-fluoro ribonucleotide
  modified_base 13: mod_base = OTHER; note = 2'-O-Methyl ribonucleotide
  modified_base 14: mod_base = OTHER; note = 2'-fluoro ribonucleotide
  modified_base 15: mod_base = OTHER; note = 2'-O-Methyl ribonucleotide
  modified_base 16: mod_base = OTHER; note = 2'-fluoro ribonucleotide
  modified_base 17..23: mod_base = OTHER; note = 2'-O-Methyl ribonucleotide
  modified_base 1..3: mod_base = OTHER; note = phosphorothioate linkage
  modified_base 21..23: mod_base = OTHER; note = phosphorothioate linkage
ttagttggtttcgtgatttccca

SEQ ID NO: 314 - RNA, 23 nt, synthetic construct
  source 1..23: mol_type = other RNA
  modified_base 1: mod_base = OTHER; note = 2'-O-Methyl ribonucleotide
  modified_base 2: mod_base = OTHER; note = 2'-fluoro ribonucleotide
  modified_base 3..6: mod_base = OTHER; note = 2'-O-Methyl ribonucleotide
  modified_base 7: mod_base = OTHER; note = 2'-fluoro ribonucleotide
  modified_base 8..11: mod_base = OTHER; note = 2'-O-Methyl ribonucleotide
  modified_base 12: mod_base = OTHER; note = 2'-fluoro ribonucleotide
  modified_base 13: mod_base = OTHER; note = 2'-O-Methyl ribonucleotide
  modified_base 14: mod_base = OTHER; note = 2'-fluoro ribonucleotide
  modified_base 15: mod_base = OTHER; note = 2'-O-Methyl ribonucleotide
  modified_base 16: mod_base = OTHER; note = 2'-fluoro ribonucleotide
  modified_base 17..23: mod_base = OTHER; note = 2'-O-Methyl ribonucleotide
  modified_base 1..3: mod_base = OTHER; note = phosphorothioate linkage
  modified_base 21..23: mod_base = OTHER; note = phosphorothioate linkage
ttatagttggtttcgtgatttcc

SEQ ID NO: 315 - RNA, 23 nt, synthetic construct
  source 1..23: mol_type = other RNA
  modified_base 1: mod_base = OTHER; note = 2'-O-Methyl ribonucleotide
  modified_base 2: mod_base = OTHER; note = 2'-fluoro ribonucleotide
  modified_base 3..6: mod_base = OTHER; note = 2'-O-Methyl ribonucleotide
  modified_base 7: mod_base = OTHER; note = 2'-fluoro ribonucleotide
  modified_base 8..11: mod_base = OTHER; note = 2'-O-Methyl ribonucleotide
  modified_base 12: mod_base = OTHER; note = 2'-fluoro ribonucleotide
  modified_base 13: mod_base = OTHER; note = 2'-O-Methyl ribonucleotide
  modified_base 14: mod_base = OTHER; note = 2'-fluoro ribonucleotide
  modified_base 15: mod_base = OTHER; note = 2'-O-Methyl ribonucleotide
  modified_base 16: mod_base = OTHER; note = 2'-fluoro ribonucleotide
  modified_base 17..23: mod_base = OTHER; note = 2'-O-Methyl ribonucleotide
  modified_base 1..3: mod_base = OTHER; note = phosphorothioate linkage
  modified_base 21..23: mod_base = OTHER; note = phosphorothioate linkage
tgtatagttggtttcgtgatttc

SEQ ID NO: 316 - RNA, 23 nt, synthetic construct
  source 1..23: mol_type = other RNA
  modified_base 1: mod_base = OTHER; note = 2'-O-Methyl ribonucleotide
  modified_base 2: mod_base = OTHER; note = 2'-fluoro ribonucleotide
  modified_base 3..6: mod_base = OTHER; note = 2'-O-Methyl ribonucleotide
  modified_base 7: mod_base = OTHER; note = 2'-fluoro ribonucleotide
  modified_base 8..11: mod_base = OTHER; note = 2'-O-Methyl ribonucleotide
  modified_base 12: mod_base = OTHER; note = 2'-fluoro ribonucleotide
  modified_base 13: mod_base = OTHER; note = 2'-O-Methyl ribonucleotide
  modified_base 14: mod_base = OTHER; note = 2'-fluoro ribonucleotide
  modified_base 15: mod_base = OTHER; note = 2'-O-Methyl ribonucleotide
  modified_base 16: mod_base = OTHER; note = 2'-fluoro ribonucleotide
  modified_base 17..23: mod_base = OTHER; note = 2'-O-Methyl ribonucleotide
  modified_base 1..3: mod_base = OTHER; note = phosphorothioate linkage
  modified_base 21..23: mod_base = OTHER; note = phosphorothioate linkage
tcgtatagttggtttcgtgattt

SEQ ID NO: 317 - RNA, 23 nt, synthetic construct
  source 1..23: mol_type = other RNA
  modified_base 1: mod_base = OTHER; note = 2'-O-Methyl ribonucleotide
  modified_base 2: mod_base = OTHER; note = 2'-fluoro ribonucleotide
  modified_base 3..6: mod_base = OTHER; note = 2'-O-Methyl ribonucleotide
  modified_base 7: mod_base = OTHER; note = 2'-fluoro ribonucleotide
  modified_base 8..11: mod_base = OTHER; note = 2'-O-Methyl ribonucleotide
  modified_base 12: mod_base = OTHER; note = 2'-fluoro ribonucleotide
  modified_base 13: mod_base = OTHER; note = 2'-O-Methyl ribonucleotide
  modified_base 14: mod_base = OTHER; note = 2'-fluoro ribonucleotide
  modified_base 15: mod_base = OTHER; note = 2'-O-Methyl ribonucleotide
  modified_base 16: mod_base = OTHER; note = 2'-fluoro ribonucleotide
  modified_base 17..23: mod_base = OTHER; note = 2'-O-Methyl ribonucleotide
  modified_base 1..3: mod_base = OTHER; note = phosphorothioate linkage
  modified_base 21..23: mod_base = OTHER; note = phosphorothioate linkage
tgcgtatagttggtttcgtgatt

SEQ ID NO: 318 - RNA, 23 nt, synthetic construct
  source 1..23: mol_type = other RNA
  modified_base 1: mod_base = OTHER; note = 2'-O-Methyl ribonucleotide
  modified_base 2: mod_base = OTHER; note = 2'-fluoro ribonucleotide
  modified_base 3..6: mod_base = OTHER; note = 2'-O-Methyl ribonucleotide
  modified_base 7: mod_base = OTHER; note = 2'-fluoro ribonucleotide
  modified_base 8..11: mod_base = OTHER; note = 2'-O-Methyl ribonucleotide
  modified_base 12: mod_base = OTHER; note = 2'-fluoro ribonucleotide
  modified_base 13: mod_base = OTHER; note = 2'-O-Methyl ribonucleotide
  modified_base 14: mod_base = OTHER; note = 2'-fluoro ribonucleotide
  modified_base 15: mod_base = OTHER; note = 2'-O-Methyl ribonucleotide
  modified_base 16: mod_base = OTHER; note = 2'-fluoro ribonucleotide
  modified_base 17..23: mod_base = OTHER; note = 2'-O-Methyl ribonucleotide
  modified_base 1..3: mod_base = OTHER; note = phosphorothioate linkage
  modified_base 21..23: mod_base = OTHER; note = phosphorothioate linkage
tagcgtatagttggtttcgtgat

SEQ ID NO: 319 - RNA, 23 nt, synthetic construct
  source 1..23: mol_type = other RNA
  modified_base 1: mod_base = OTHER; note = 2'-O-Methyl ribonucleotide
  modified_base 2: mod_base = OTHER; note = 2'-fluoro ribonucleotide
  modified_base 3..6: mod_base = OTHER; note = 2'-O-Methyl ribonucleotide
  modified_base 7: mod_base = OTHER; note = 2'-fluoro ribonucleotide
  modified_base 8..11: mod_base = OTHER; note = 2'-O-Methyl ribonucleotide
  modified_base 12: mod_base = OTHER; note = 2'-fluoro ribonucleotide
  modified_base 13: mod_base = OTHER; note = 2'-O-Methyl ribonucleotide
  modified_base 14: mod_base = OTHER; note = 2'-fluoro ribonucleotide
  modified_base 15: mod_base = OTHER; note = 2'-O-Methyl ribonucleotide
  modified_base 16: mod_base = OTHER; note = 2'-fluoro ribonucleotide
  modified_base 17..23: mod_base = OTHER; note = 2'-O-Methyl ribonucleotide
  modified_base 1..3: mod_base = OTHER; note = phosphorothioate linkage
  modified_base 21..23: mod_base = OTHER; note = phosphorothioate linkage
ttgtagcgtatagttggtttcgt

SEQ ID NO: 320 - RNA, 23 nt, synthetic construct
  source 1..23: mol_type = other RNA
  modified_base 1: mod_base = OTHER; note = 2'-O-Methyl ribonucleotide
  modified_base 2: mod_base = OTHER; note = 2'-fluoro ribonucleotide
  modified_base 3..6: mod_base = OTHER; note = 2'-O-Methyl ribonucleotide
  modified_base 7: mod_base = OTHER; note = 2'-fluoro ribonucleotide
  modified_base 8..11: mod_base = OTHER; note = 2'-O-Methyl ribonucleotide
  modified_base 12: mod_base = OTHER; note = 2'-fluoro ribonucleotide
  modified_base 13: mod_base = OTHER; note = 2'-O-Methyl ribonucleotide
  modified_base 14: mod_base = OTHER; note = 2'-fluoro ribonucleotide
  modified_base 15: mod_base = OTHER; note = 2'-O-Methyl ribonucleotide
  modified_base 16: mod_base = OTHER; note = 2'-fluoro ribonucleotide
  modified_base 17..23: mod_base = OTHER; note = 2'-O-Methyl ribonucleotide
  modified_base 1..3: mod_base = OTHER; note = phosphorothioate linkage
  modified_base 21..23: mod_base = OTHER; note = phosphorothioate linkage
tggacattgccagtaatcgcaac

SEQ ID NO: 321 - RNA, 23 nt, synthetic construct
  source 1..23: mol_type = other RNA
  modified_base 1: mod_base = OTHER; note = 2'-O-Methyl ribonucleotide
  modified_base 2: mod_base = OTHER; note = 2'-fluoro ribonucleotide
  modified_base 3..6: mod_base = OTHER; note = 2'-O-Methyl ribonucleotide
  modified_base 7: mod_base = OTHER; note = 2'-fluoro ribonucleotide
  modified_base 8..11: mod_base = OTHER; note = 2'-O-Methyl ribonucleotide
  modified_base 12: mod_base = OTHER; note = 2'-fluoro ribonucleotide
  modified_base 13: mod_base = OTHER; note = 2'-O-Methyl ribonucleotide
  modified_base 14: mod_base = OTHER; note = 2'-fluoro ribonucleotide
  modified_base 15: mod_base = OTHER; note = 2'-O-Methyl ribonucleotide
  modified_base 16: mod_base = OTHER; note = 2'-fluoro ribonucleotide
  modified_base 17..23: mod_base = OTHER; note = 2'-O-Methyl ribonucleotide
  modified_base 1..3: mod_base = OTHER; note = phosphorothioate linkage
  modified_base 21..23: mod_base = OTHER; note = phosphorothioate linkage
tgggacattgccagtaatcgcaa

SEQ ID NO: 322 - RNA, 23 nt, synthetic construct
  source 1..23: mol_type = other RNA
  modified_base 1: mod_base = OTHER; note = 2'-O-Methyl ribonucleotide
  modified_base 2: mod_base = OTHER; note = 2'-fluoro ribonucleotide
  modified_base 3..6: mod_base = OTHER; note = 2'-O-Methyl ribonucleotide
  modified_base 7: mod_base = OTHER; note = 2'-fluoro ribonucleotide
  modified_base 8..11: mod_base = OTHER; note = 2'-O-Methyl ribonucleotide
  modified_base 12: mod_base = OTHER; note = 2'-fluoro ribonucleotide
  modified_base 13: mod_base = OTHER; note = 2'-O-Methyl ribonucleotide
  modified_base 14: mod_base = OTHER; note = 2'-fluoro ribonucleotide
  modified_base 15: mod_base = OTHER; note = 2'-O-Methyl ribonucleotide
  modified_base 16: mod_base = OTHER; note = 2'-fluoro ribonucleotide
  modified_base 17..23: mod_base = OTHER; note = 2'-O-Methyl ribonucleotide
  modified_base 1..3: mod_base = OTHER; note = phosphorothioate linkage
  modified_base 21..23: mod_base = OTHER; note = phosphorothioate linkage
tggggacattgccagtaatcgca

SEQ ID NO: 323 - RNA, 23 nt, synthetic construct
  source 1..23: mol_type = other RNA
  modified_base 1: mod_base = OTHER; note = 2'-O-Methyl ribonucleotide
  modified_base 2: mod_base = OTHER; note = 2'-fluoro ribonucleotide
  modified_base 3..6: mod_base = OTHER; note = 2'-O-Methyl ribonucleotide
  modified_base 7: mod_base = OTHER; note = 2'-fluoro ribonucleotide
  modified_base 8..11: mod_base = OTHER; note = 2'-O-Methyl ribonucleotide
  modified_base 12: mod_base = OTHER; note = 2'-fluoro ribonucleotide
  modified_base 13: mod_base = OTHER; note = 2'-O-Methyl ribonucleotide
  modified_base 14: mod_base = OTHER; note = 2'-fluoro ribonucleotide
  modified_base 15: mod_base = OTHER; note = 2'-O-Methyl ribonucleotide
  modified_base 16: mod_base = OTHER; note = 2'-fluoro ribonucleotide
  modified_base 17..23: mod_base = OTHER; note = 2'-O-Methyl ribonucleotide
  modified_base 1..3: mod_base = OTHER; note = phosphorothioate linkage
  modified_base 21..23: mod_base = OTHER; note = phosphorothioate linkage
ttggggacattgccagtaatcgc

SEQ ID NO: 324 - RNA, 23 nt, synthetic construct
  source 1..23: mol_type = other RNA
  modified_base 1: mod_base = OTHER; note = 2'-O-Methyl ribonucleotide
  modified_base 2: mod_base = OTHER; note = 2'-fluoro ribonucleotide
  modified_base 3..6: mod_base = OTHER; note = 2'-O-Methyl ribonucleotide
  modified_base 7: mod_base = OTHER; note = 2'-fluoro ribonucleotide
  modified_base 8..11: mod_base = OTHER; note = 2'-O-Methyl ribonucleotide
  modified_base 12: mod_base = OTHER; note = 2'-fluoro ribonucleotide
  modified_base 13: mod_base = OTHER; note = 2'-O-Methyl ribonucleotide
  modified_base 14: mod_base = OTHER; note = 2'-fluoro ribonucleotide
  modified_base 15: mod_base = OTHER; note = 2'-O-Methyl ribonucleotide
  modified_base 16: mod_base = OTHER; note = 2'-fluoro ribonucleotide
  modified_base 17..23: mod_base = OTHER; note = 2'-O-Methyl ribonucleotide
  modified_base 1..3: mod_base = OTHER; note = phosphorothioate linkage
  modified_base 21..23: mod_base = OTHER; note = phosphorothioate linkage
tattggggacattgccagtaatc

SEQ ID NO: 325 - RNA, 23 nt, synthetic construct
  source 1..23: mol_type = other RNA
  modified_base 1: mod_base = OTHER; note = 2'-O-Methyl ribonucleotide
  modified_base 2: mod_base = OTHER; note = 2'-fluoro ribonucleotide
  modified_base 3..6: mod_base = OTHER; note = 2'-O-Methyl ribonucleotide
  modified_base 7: mod_base = OTHER; note = 2'-fluoro ribonucleotide
  modified_base 8..11: mod_base = OTHER; note = 2'-O-Methyl ribonucleotide
  modified_base 12: mod_base = OTHER; note = 2'-fluoro ribonucleotide
  modified_base 13: mod_base = OTHER; note = 2'-O-Methyl ribonucleotide
  modified_base 14: mod_base = OTHER; note = 2'-fluoro ribonucleotide
  modified_base 15: mod_base = OTHER; note = 2'-O-Methyl ribonucleotide
  modified_base 16: mod_base = OTHER; note = 2'-fluoro ribonucleotide
  modified_base 17..23: mod_base = OTHER; note = 2'-O-Methyl ribonucleotide
  modified_base 1..3: mod_base = OTHER; note = phosphorothioate linkage
  modified_base 21..23: mod_base = OTHER; note = phosphorothioate linkage
tgattgcattggggacattgcca

SEQ ID NO: 326 - RNA, 23 nt, synthetic construct
  source 1..23: mol_type = other RNA
  modified_base 1: mod_base = OTHER; note = 2'-O-Methyl ribonucleotide
  modified_base 2: mod_base = OTHER; note = 2'-fluoro ribonucleotide
  modified_base 3..6: mod_base = OTHER; note = 2'-O-Methyl ribonucleotide
  modified_base 7: mod_base = OTHER; note = 2'-fluoro ribonucleotide
  modified_base 8..11: mod_base = OTHER; note = 2'-O-Methyl ribonucleotide
  modified_base 12: mod_base = OTHER; note = 2'-fluoro ribonucleotide
  modified_base 13: mod_base = OTHER; note = 2'-O-Methyl ribonucleotide
  modified_base 14: mod_base = OTHER; note = 2'-fluoro ribonucleotide
  modified_base 15: mod_base = OTHER; note = 2'-O-Methyl ribonucleotide
  modified_base 16: mod_base = OTHER; note = 2'-fluoro ribonucleotide
  modified_base 17..23: mod_base = OTHER; note = 2'-O-Methyl ribonucleotide
  modified_base 1..3: mod_base = OTHER; note = phosphorothioate linkage
  modified_base 21..23: mod_base = OTHER; note = phosphorothioate linkage
tggattgcattggggacattgcc

SEQ ID NO: 327 - RNA, 23 nt, synthetic construct
  source 1..23: mol_type = other RNA
  modified_base 1: mod_base = OTHER; note = 2'-O-Methyl ribonucleotide
  modified_base 2: mod_base = OTHER; note = 2'-fluoro ribonucleotide
  modified_base 3..6: mod_base = OTHER; note = 2'-O-Methyl ribonucleotide
  modified_base 7: mod_base = OTHER; note = 2'-fluoro ribonucleotide
  modified_base 8..11: mod_base = OTHER; note = 2'-O-Methyl ribonucleotide
  modified_base 12: mod_base = OTHER; note = 2'-fluoro ribonucleotide
  modified_base 13: mod_base = OTHER; note = 2'-O-Methyl ribonucleotide
  modified_base 14: mod_base = OTHER; note = 2'-fluoro ribonucleotide
  modified_base 15: mod_base = OTHER; note = 2'-O-Methyl ribonucleotide
  modified_base 16: mod_base = OTHER; note = 2'-fluoro ribonucleotide
  modified_base 17..23: mod_base = OTHER; note = 2'-O-Methyl ribonucleotide
  modified_base 1..3: mod_base = OTHER; note = phosphorothioate linkage
  modified_base 21..23: mod_base = OTHER; note = phosphorothioate linkage
tcgggattgcattggggacattg

SEQ ID NO: 328 - RNA, 23 nt, synthetic construct
  source 1..23: mol_type = other RNA
  modified_base 1: mod_base = OTHER; note = 2'-O-Methyl ribonucleotide
  modified_base 2: mod_base = OTHER; note = 2'-fluoro ribonucleotide
  modified_base 3..6: mod_base = OTHER; note = 2'-O-Methyl ribonucleotide
  modified_base 7: mod_base = OTHER; note = 2'-fluoro ribonucleotide
  modified_base 8..11: mod_base = OTHER; note = 2'-O-Methyl ribonucleotide
  modified_base 12: mod_base = OTHER; note = 2'-fluoro ribonucleotide
  modified_base 13: mod_base = OTHER; note = 2'-O-Methyl ribonucleotide
  modified_base 14: mod_base = OTHER; note = 2'-fluoro ribonucleotide
  modified_base 15: mod_base = OTHER; note = 2'-O-Methyl ribonucleotide
  modified_base 16: mod_base = OTHER; note = 2'-fluoro ribonucleotide
  modified_base 17..23: mod_base = OTHER; note = 2'-O-Methyl ribonucleotide
  modified_base 1..3: mod_base = OTHER; note = phosphorothioate linkage
  modified_base 21..23: mod_base = OTHER; note = phosphorothioate linkage
ttttccgggattgcattggggac

SEQ ID NO: 329 - RNA, 23 nt, synthetic construct
  source 1..23: mol_type = other RNA
  modified_base 1: mod_base = OTHER; note = 2'-O-Methyl ribonucleotide
  modified_base 2: mod_base = OTHER; note = 2'-fluoro ribonucleotide
  modified_base 3..6: mod_base = OTHER; note = 2'-O-Methyl ribonucleotide
  modified_base 7: mod_base = OTHER; note = 2'-fluoro ribonucleotide
  modified_base 8..11: mod_base = OTHER; note = 2'-O-Methyl ribonucleotide
  modified_base 12: mod_base = OTHER; note = 2'-fluoro ribonucleotide
  modified_base 13: mod_base = OTHER; note = 2'-O-Methyl ribonucleotide
  modified_base 14: mod_base = OTHER; note = 2'-fluoro ribonucleotide
  modified_base 15: mod_base = OTHER; note = 2'-O-Methyl ribonucleotide
  modified_base 16: mod_base = OTHER; note = 2'-fluoro ribonucleotide
  modified_base 17..23: mod_base = OTHER; note = 2'-O-Methyl ribonucleotide
  modified_base 1..3: mod_base = OTHER; note = phosphorothioate linkage
  modified_base 21..23: mod_base = OTHER; note = phosphorothioate linkage
ttgttttccgggattgcattggg

SEQ ID NO: 330 - RNA, 23 nt, synthetic construct
  source 1..23: mol_type = other RNA
  modified_base 1: mod_base = OTHER; note = 2'-O-Methyl ribonucleotide
  modified_base 2: mod_base = OTHER; note = 2'-fluoro ribonucleotide
  modified_base 3..6: mod_base = OTHER; note = 2'-O-Methyl ribonucleotide
  modified_base 7: mod_base = OTHER; note = 2'-fluoro ribonucleotide
  modified_base 8..11: mod_base = OTHER; note = 2'-O-Methyl ribonucleotide
  modified_base 12: mod_base = OTHER; note = 2'-fluoro ribonucleotide
  modified_base 13: mod_base = OTHER; note = 2'-O-Methyl ribonucleotide
  modified_base 14: mod_base = OTHER; note = 2'-fluoro ribonucleotide
  modified_base 15: mod_base = OTHER; note = 2'-O-Methyl ribonucleotide
  modified_base 16: mod_base = OTHER; note = 2'-fluoro ribonucleotide
  modified_base 17..23: mod_base = OTHER; note = 2'-O-Methyl ribonucleotide
  modified_base 1..3: mod_base = OTHER; note = phosphorothioate linkage
  modified_base 21..23: mod_base = OTHER; note = phosphorothioate linkage
tttgttttccgggattgcattgg

SEQ ID NO: 331 - RNA, 23 nt, synthetic construct
  source 1..23: mol_type = other RNA
  modified_base 1: mod_base = OTHER; note = 2'-O-Methyl ribonucleotide
  modified_base 2: mod_base = OTHER; note = 2'-fluoro ribonucleotide
  modified_base 3..6: mod_base = OTHER; note = 2'-O-Methyl ribonucleotide
  modified_base 7: mod_base = OTHER; note = 2'-fluoro ribonucleotide
  modified_base 8..11: mod_base = OTHER; note = 2'-O-Methyl ribonucleotide
  modified_base 12: mod_base = OTHER; note = 2'-fluoro ribonucleotide
  modified_base 13: mod_base = OTHER; note = 2'-O-Methyl ribonucleotide
  modified_base 14: mod_base = OTHER; note = 2'-fluoro ribonucleotide
  modified_base 15: mod_base = OTHER; note = 2'-O-Methyl ribonucleotide
  modified_base 16: mod_base = OTHER; note = 2'-fluoro ribonucleotide
  modified_base 17..23: mod_base = OTHER; note = 2'-O-Methyl ribonucleotide
  modified_base 1..3: mod_base = OTHER; note = phosphorothioate linkage
  modified_base 21..23: mod_base = OTHER; note = phosphorothioate linkage
ttttgttttccgggattgcattg

SEQ ID NO: 332 - RNA, 23 nt, synthetic construct
  source 1..23: mol_type = other RNA
  modified_base 1: mod_base = OTHER; note = 2'-O-Methyl ribonucleotide
  modified_base 2: mod_base = OTHER; note = 2'-fluoro ribonucleotide
  modified_base 3..6: mod_base = OTHER; note = 2'-O-Methyl ribonucleotide
  modified_base 7: mod_base = OTHER; note = 2'-fluoro ribonucleotide
  modified_base 8..11: mod_base = OTHER; note = 2'-O-Methyl ribonucleotide
  modified_base 12: mod_base = OTHER; note = 2'-fluoro ribonucleotide
  modified_base 13: mod_base = OTHER; note = 2'-O-Methyl ribonucleotide
  modified_base 14: mod_base = OTHER; note = 2'-fluoro ribonucleotide
  modified_base 15: mod_base = OTHER; note = 2'-O-Methyl ribonucleotide
  modified_base 16: mod_base = OTHER; note = 2'-fluoro ribonucleotide
  modified_base 17..23: mod_base = OTHER; note = 2'-O-Methyl ribonucleotide
  modified_base 1..3: mod_base = OTHER; note = phosphorothioate linkage
  modified_base 21..23: mod_base = OTHER; note = phosphorothioate linkage
tctttgttttccgggattgcatt

SEQ ID NO: 333 - RNA, 23 nt, synthetic construct
  source 1..23: mol_type = other RNA
  modified_base 1: mod_base = OTHER; note = 2'-O-Methyl ribonucleotide
  modified_base 2: mod_base = OTHER; note = 2'-fluoro ribonucleotide
  modified_base 3..6: mod_base = OTHER; note = 2'-O-Methyl ribonucleotide
  modified_base 7: mod_base = OTHER; note = 2'-fluoro ribonucleotide
  modified_base 8..11: mod_base = OTHER; note = 2'-O-Methyl ribonucleotide
  modified_base 12: mod_base = OTHER; note = 2'-fluoro ribonucleotide
  modified_base 13: mod_base = OTHER; note = 2'-O-Methyl ribonucleotide
  modified_base 14: mod_base = OTHER; note = 2'-fluoro ribonucleotide
  modified_base 15: mod_base = OTHER; note = 2'-O-Methyl ribonucleotide
  modified_base 16: mod_base = OTHER; note = 2'-fluoro ribonucleotide
  modified_base 17..23: mod_base = OTHER; note = 2'-O-Methyl ribonucleotide
  modified_base 1..3: mod_base = OTHER; note = phosphorothioate linkage
  modified_base 21..23: mod_base = OTHER; note = phosphorothioate linkage
ttctttgttttccgggattgcat

SEQ ID NO: 334 - RNA, 23 nt, synthetic construct
  source 1..23: mol_type = other RNA
  modified_base 1: mod_base = OTHER; note = 2'-O-Methyl ribonucleotide
  modified_base 2: mod_base = OTHER; note = 2'-fluoro ribonucleotide
  modified_base 3..6: mod_base = OTHER; note = 2'-O-Methyl ribonucleotide
  modified_base 7: mod_base = OTHER; note = 2'-fluoro ribonucleotide
  modified_base 8..11: mod_base = OTHER; note = 2'-O-Methyl ribonucleotide
  modified_base 12: mod_base = OTHER; note = 2'-fluoro ribonucleotide
  modified_base 13: mod_base = OTHER; note = 2'-O-Methyl ribonucleotide
  modified_base 14: mod_base = OTHER; note = 2'-fluoro ribonucleotide
  modified_base 15: mod_base = OTHER; note = 2'-O-Methyl ribonucleotide
  modified_base 16: mod_base = OTHER; note = 2'-fluoro ribonucleotide
  modified_base 17..23: mod_base = OTHER; note = 2'-O-Methyl ribonucleotide
  modified_base 1..3: mod_base = OTHER; note = phosphorothioate linkage
  modified_base 21..23: mod_base = OTHER; note = phosphorothioate linkage
tatctttgttttccgggattgca

SEQ ID NO: 335 - RNA, 23 nt, synthetic construct
  source 1..23: mol_type = other RNA
  modified_base 1: mod_base = OTHER; note = 2'-O-Methyl ribonucleotide
  modified_base 2: mod_base = OTHER; note = 2'-fluoro ribonucleotide
  modified_base 3..6: mod_base = OTHER; note = 2'-O-Methyl ribonucleotide
  modified_base 7: mod_base = OTHER; note = 2'-fluoro ribonucleotide
  modified_base 8..11: mod_base = OTHER; note = 2'-O-Methyl ribonucleotide
  modified_base 12: mod_base = OTHER; note = 2'-fluoro ribonucleotide
  modified_base 13: mod_base = OTHER; note = 2'-O-Methyl ribonucleotide
  modified_base 14: mod_base = OTHER; note = 2'-fluoro ribonucleotide
  modified_base 15: mod_base = OTHER; note = 2'-O-Methyl ribonucleotide
  modified_base 16: mod_base = OTHER; note = 2'-fluoro ribonucleotide
  modified_base 17..23: mod_base = OTHER; note = 2'-O-Methyl ribonucleotide
  modified_base 1..3: mod_base = OTHER; note = phosphorothioate linkage
  modified_base 21..23: mod_base = OTHER; note = phosphorothioate linkage
tcaagtagaaaacaccaaatctt

SEQ ID NO: 336 - RNA, 23 nt, synthetic construct
  source 1..23: mol_type = other RNA
  modified_base 1: mod_base = OTHER; note = 2'-O-Methyl ribonucleotide
  modified_base 2: mod_base = OTHER; note = 2'-fluoro ribonucleotide
  modified_base 3..6: mod_base = OTHER; note = 2'-O-Methyl ribonucleotide
  modified_base 7: mod_base = OTHER; note = 2'-fluoro ribonucleotide
  modified_base 8..11: mod_base = OTHER; note = 2'-O-Methyl ribonucleotide
  modified_base 12: mod_base = OTHER; note = 2'-fluoro ribonucleotide
  modified_base 13: mod_base = OTHER; note = 2'-O-Methyl ribonucleotide
  modified_base 14: mod_base = OTHER; note = 2'-fluoro ribonucleotide
  modified_base 15: mod_base = OTHER; note = 2'-O-Methyl ribonucleotide
  modified_base 16: mod_base = OTHER; note = 2'-fluoro ribonucleotide
  modified_base 17..23: mod_base = OTHER; note = 2'-O-Methyl ribonucleotide
  modified_base 1..3: mod_base = OTHER; note = phosphorothioate linkage
  modified_base 21..23: mod_base = OTHER; note = phosphorothioate linkage
tccaagtagaaaacaccaaatct

SEQ ID NO: 337 - RNA, 23 nt, synthetic construct
  source 1..23: mol_type = other RNA
  modified_base 1: mod_base = OTHER; note = 2'-O-Methyl ribonucleotide
  modified_base 2: mod_base = OTHER; note = 2'-fluoro ribonucleotide
  modified_base 3..6: mod_base = OTHER; note = 2'-O-Methyl ribonucleotide
  modified_base 7: mod_base = OTHER; note = 2'-fluoro ribonucleotide
  modified_base 8..11: mod_base = OTHER; note = 2'-O-Methyl ribonucleotide
  modified_base 12: mod_base = OTHER; note = 2'-fluoro ribonucleotide
  modified_base 13: mod_base = OTHER; note = 2'-O-Methyl ribonucleotide
  modified_base 14: mod_base = OTHER; note = 2'-fluoro ribonucleotide
  modified_base 15: mod_base = OTHER; note = 2'-O-Methyl ribonucleotide
  modified_base 16: mod_base = OTHER; note = 2'-fluoro ribonucleotide
  modified_base 17..23: mod_base = OTHER; note = 2'-O-Methyl ribonucleotide
  modified_base 1..3: mod_base = OTHER; note = phosphorothioate linkage
  modified_base 21..23: mod_base = OTHER; note = phosphorothioate linkage
tcccaagtagaaaacaccaaatc

SEQ ID NO: 338 - RNA, 23 nt, synthetic construct
  source 1..23: mol_type = other RNA
  modified_base 1: mod_base = OTHER; note = 2'-O-Methyl ribonucleotide
  modified_base 2: mod_base = OTHER; note = 2'-fluoro ribonucleotide
  modified_base 3..6: mod_base = OTHER; note = 2'-O-Methyl ribonucleotide
  modified_base 7: mod_base = OTHER; note = 2'-fluoro ribonucleotide
  modified_base 8..11: mod_base = OTHER; note = 2'-O-Methyl ribonucleotide
  modified_base 12: mod_base = OTHER; note = 2'-fluoro ribonucleotide
  modified_base 13: mod_base = OTHER; note = 2'-O-Methyl ribonucleotide
  modified_base 14: mod_base = OTHER; note = 2'-fluoro ribonucleotide
  modified_base 15: mod_base = OTHER; note = 2'-O-Methyl ribonucleotide
  modified_base 16: mod_base = OTHER; note = 2'-fluoro ribonucleotide
  modified_base 17..23: mod_base = OTHER; note = 2'-O-Methyl ribonucleotide
  modified_base 1..3: mod_base = OTHER; note = phosphorothioate linkage
  modified_base 21..23: mod_base = OTHER; note = phosphorothioate linkage
tgtgatcccaagtagaaaacacc

SEQ ID NO: 339 - RNA, 23 nt, synthetic construct
  source 1..23: mol_type = other RNA
  modified_base 1: mod_base = OTHER; note = 2'-O-Methyl ribonucleotide
  modified_base 2: mod_base = OTHER; note = 2'-fluoro ribonucleotide
  modified_base 3..6: mod_base = OTHER; note = 2'-O-Methyl ribonucleotide
  modified_base 7: mod_base = OTHER; note = 2'-fluoro ribonucleotide
  modified_base 8..11: mod_base = OTHER; note = 2'-O-Methyl ribonucleotide
  modified_base 12: mod_base = OTHER; note = 2'-fluoro ribonucleotide
  modified_base 13: mod_base = OTHER; note = 2'-O-Methyl ribonucleotide
  modified_base 14: mod_base = OTHER; note = 2'-fluoro ribonucleotide
  modified_base 15: mod_base = OTHER; note = 2'-O-Methyl ribonucleotide
  modified_base 16: mod_base = OTHER; note = 2'-fluoro ribonucleotide
  modified_base 17..23: mod_base = OTHER; note = 2'-O-Methyl ribonucleotide
  modified_base 1..3: mod_base = OTHER; note = phosphorothioate linkage
  modified_base 21..23: mod_base = OTHER; note = phosphorothioate linkage
ttttgtgatcccaagtagaaaac

SEQ ID NO: 340 - RNA, 23 nt, synthetic construct
  source 1..23: mol_type = other RNA
  modified_base 1: mod_base = OTHER; note = 2'-O-Methyl ribonucleotide
  modified_base 2: mod_base = OTHER; note = 2'-fluoro ribonucleotide
  modified_base 3..6: mod_base = OTHER; note = 2'-O-Methyl ribonucleotide
  modified_base 7: mod_base = OTHER; note = 2'-fluoro ribonucleotide
  modified_base 8..11: mod_base = OTHER; note = 2'-O-Methyl ribonucleotide
  modified_base 12: mod_base = OTHER; note = 2'-fluoro ribonucleotide
  modified_base 13: mod_base = OTHER; note = 2'-O-Methyl ribonucleotide
  modified_base 14: mod_base = OTHER; note = 2'-fluoro ribonucleotide
  modified_base 15: mod_base = OTHER; note = 2'-O-Methyl ribonucleotide
  modified_base 16: mod_base = OTHER; note = 2'-fluoro ribonucleotide
  modified_base 17..23: mod_base = OTHER; note = 2'-O-Methyl ribonucleotide
  modified_base 1..3: mod_base = OTHER; note = phosphorothioate linkage
  modified_base 21..23: mod_base = OTHER; note = phosphorothioate linkage
tctttgtgatcccaagtagaaaa

SEQ ID NO: 341 - RNA, 23 nt, synthetic construct
  source 1..23: mol_type = other RNA
  modified_base 1: mod_base = OTHER; note = 2'-O-Methyl ribonucleotide
  modified_base 2: mod_base = OTHER; note = 2'-fluoro ribonucleotide
  modified_base 3..6: mod_base = OTHER; note = 2'-O-Methyl ribonucleotide
  modified_base 7: mod_base = OTHER; note = 2'-fluoro ribonucleotide
  modified_base 8..11: mod_base = OTHER; note = 2'-O-Methyl ribonucleotide
  modified_base 12: mod_base = OTHER; note = 2'-fluoro ribonucleotide
  modified_base 13: mod_base = OTHER; note = 2'-O-Methyl ribonucleotide
  modified_base 14: mod_base = OTHER; note = 2'-fluoro ribonucleotide
  modified_base 15: mod_base = OTHER; note = 2'-O-Methyl ribonucleotide
  modified_base 16: mod_base = OTHER; note = 2'-fluoro ribonucleotide
  modified_base 17..23: mod_base = OTHER; note = 2'-O-Methyl ribonucleotide
  modified_base 1..3: mod_base = OTHER; note = phosphorothioate linkage
  modified_base 21..23: mod_base = OTHER; note = phosphorothioate linkage
ttgctttgtgatcccaagtagaa

SEQ ID NO: 342 - RNA, 23 nt, synthetic construct
  source 1..23: mol_type = other RNA
  modified_base 1: mod_base = OTHER; note = 2'-O-Methyl ribonucleotide
  modified_base 2: mod_base = OTHER; note = 2'-fluoro ribonucleotide
  modified_base 3..6: mod_base = OTHER; note = 2'-O-Methyl ribonucleotide
  modified_base 7: mod_base = OTHER; note = 2'-fluoro ribonucleotide
  modified_base 8..11: mod_base = OTHER; note = 2'-O-Methyl ribonucleotide
  modified_base 12: mod_base = OTHER; note = 2'-fluoro ribonucleotide
  modified_base 13: mod_base = OTHER; note = 2'-O-Methyl ribonucleotide
  modified_base 14: mod_base = OTHER; note = 2'-fluoro ribonucleotide
  modified_base 15: mod_base = OTHER; note = 2'-O-Methyl ribonucleotide
  modified_base 16: mod_base = OTHER; note = 2'-fluoro ribonucleotide
  modified_base 17..23: mod_base = OTHER; note = 2'-O-Methyl ribonucleotide
  modified_base 1..3: mod_base = OTHER; note = phosphorothioate linkage
  modified_base 21..23: mod_base = OTHER; note = phosphorothioate linkage
tttgctttgtgatcccaagtaga

SEQ ID NO: 343 - RNA, 23 nt, synthetic construct
  source 1..23: mol_type = other RNA
  modified_base 1: mod_base = OTHER; note = 2'-O-Methyl ribonucleotide
  modified_base 2: mod_base = OTHER; note = 2'-fluoro ribonucleotide
  modified_base 3..6: mod_base = OTHER; note = 2'-O-Methyl ribonucleotide
  modified_base 7: mod_base = OTHER; note = 2'-fluoro ribonucleotide
  modified_base 8..11: mod_base = OTHER; note = 2'-O-Methyl ribonucleotide
  modified_base 12: mod_base = OTHER; note = 2'-fluoro ribonucleotide
  modified_base 13: mod_base = OTHER; note = 2'-O-Methyl ribonucleotide
  modified_base 14: mod_base = OTHER; note = 2'-fluoro ribonucleotide
  modified_base 15: mod_base = OTHER; note = 2'-O-Methyl ribonucleotide
  modified_base 16: mod_base = OTHER; note = 2'-fluoro ribonucleotide
  modified_base 17..23: mod_base = OTHER; note = 2'-O-Methyl ribonucleotide
  modified_base 1..3: mod_base = OTHER; note = phosphorothioate linkage
  modified_base 21..23: mod_base = OTHER; note = phosphorothioate linkage
tggtttgttatatttaccattta

SEQ ID NO: 344 - RNA, 23 nt, synthetic construct
  source 1..23: mol_type = other RNA
  modified_base 1: mod_base = OTHER; note = 2'-O-Methyl ribonucleotide
  modified_base 2: mod_base = OTHER; note = 2'-fluoro ribonucleotide
  modified_base 3..6: mod_base = OTHER; note = 2'-O-Methyl ribonucleotide
  modified_base 7: mod_base = OTHER; note = 2'-fluoro ribonucleotide
  modified_base 8..11: mod_base = OTHER; note = 2'-O-Methyl ribonucleotide
  modified_base 12: mod_base = OTHER; note = 2'-fluoro ribonucleotide
  modified_base 13: mod_base = OTHER; note = 2'-O-Methyl ribonucleotide
  modified_base 14: mod_base = OTHER; note = 2'-fluoro ribonucleotide
  modified_base 15: mod_base = OTHER; note = 2'-O-Methyl ribonucleotide
  modified_base 16: mod_base = OTHER; note = 2'-fluoro ribonucleotide
  modified_base 17..23: mod_base = OTHER; note = 2'-O-Methyl ribonucleotide
  modified_base 1..3: mod_base = OTHER; note = phosphorothioate linkage
  modified_base 21..23: mod_base = OTHER; note = phosphorothioate linkage
taccttccattttgagacttcca

SEQ ID NO: 345 - RNA, 23 nt, synthetic construct
  source 1..23: mol_type = other RNA
  modified_base 1: mod_base = OTHER; note = 2'-O-Methyl ribonucleotide
  modified_base 2: mod_base = OTHER; note = 2'-fluoro ribonucleotide
  modified_base 3..6: mod_base = OTHER; note = 2'-O-Methyl ribonucleotide
  modified_base 7: mod_base = OTHER; note = 2'-fluoro ribonucleotide
  modified_base 8..11: mod_base = OTHER; note = 2'-O-Methyl ribonucleotide
  modified_base 12: mod_base = OTHER; note = 2'-fluoro ribonucleotide
  modified_base 13: mod_base = OTHER; note = 2'-O-Methyl ribonucleotide
  modified_base 14: mod_base = OTHER; note = 2'-fluoro ribonucleotide
  modified_base 15: mod_base = OTHER; note = 2'-O-Methyl ribonucleotide
  modified_base 16: mod_base = OTHER; note = 2'-fluoro ribonucleotide
  modified_base 17..23: mod_base = OTHER; note = 2'-O-Methyl ribonucleotide
  modified_base 1..3: mod_base = OTHER; note = phosphorothioate linkage
  modified_base 21..23: mod_base = OTHER; note = phosphorothioate linkage
tagagtataaccttccattttga

SEQ ID NO: 346 - RNA, 23 nt, synthetic construct
  source 1..23: mol_type = other RNA
  modified_base 1: mod_base = OTHER; note = 2'-O-Methyl ribonucleotide
  modified_base 2: mod_base = OTHER; note = 2'-fluoro ribonucleotide
  modified_base 3..6: mod_base = OTHER; note = 2'-O-Methyl ribonucleotide
  modified_base 7: mod_base = OTHER; note = 2'-fluoro ribonucleotide
  modified_base 8..11: mod_base = OTHER; note = 2'-O-Methyl ribonucleotide
  modified_base 12: mod_base = OTHER; note = 2'-fluoro ribonucleotide
  modified_base 13: mod_base = OTHER; note = 2'-O-Methyl ribonucleotide
  modified_base 14: mod_base = OTHER; note = 2'-fluoro ribonucleotide
  modified_base 15: mod_base = OTHER; note = 2'-O-Methyl ribonucleotide
  modified_base 16: mod_base = OTHER; note = 2'-fluoro ribonucleotide
  modified_base 17..23: mod_base = OTHER; note = 2'-O-Methyl ribonucleotide
  modified_base 1..3: mod_base = OTHER; note = phosphorothioate linkage
  modified_base 21..23: mod_base = OTHER; note = phosphorothioate linkage
ttagagtataaccttccattttg

SEQ ID NO: 347 - RNA, 23 nt, synthetic construct
  source 1..23: mol_type = other RNA
  modified_base 1: mod_base = OTHER; note = 2'-O-Methyl ribonucleotide
  modified_base 2: mod_base = OTHER; note = 2'-fluoro ribonucleotide
  modified_base 3..6: mod_base = OTHER; note = 2'-O-Methyl ribonucleotide
  modified_base 7: mod_base = OTHER; note = 2'-fluoro ribonucleotide
  modified_base 8..11: mod_base = OTHER; note = 2'-O-Methyl ribonucleotide
  modified_base 12: mod_base = OTHER; note = 2'-fluoro ribonucleotide
  modified_base 13: mod_base = OTHER; note = 2'-O-Methyl ribonucleotide
  modified_base 14: mod_base = OTHER; note = 2'-fluoro ribonucleotide
  modified_base 15: mod_base = OTHER; note = 2'-O-Methyl ribonucleotide
  modified_base 16: mod_base = OTHER; note = 2'-fluoro ribonucleotide
  modified_base 17..23: mod_base = OTHER; note = 2'-O-Methyl ribonucleotide
  modified_base 1..3: mod_base = OTHER; note = phosphorothioate linkage
  modified_base 21..23: mod_base = OTHER; note = phosphorothioate linkage
tatagagtataaccttccatttt

SEQ ID NO: 348 - RNA, 23 nt, synthetic construct
  source 1..23: mol_type = other RNA
  modified_base 1: mod_base = OTHER; note = 2'-O-Methyl ribonucleotide
  modified_base 2: mod_base = OTHER; note = 2'-fluoro ribonucleotide
  modified_base 3..6: mod_base = OTHER; note = 2'-O-Methyl ribonucleotide
  modified_base 7: mod_base = OTHER; note = 2'-fluoro ribonucleotide
  modified_base 8..11: mod_base = OTHER; note = 2'-O-Methyl ribonucleotide
  modified_base 12: mod_base = OTHER; note = 2'-fluoro ribonucleotide
  modified_base 13: mod_base = OTHER; note = 2'-O-Methyl ribonucleotide
  modified_base 14: mod_base = OTHER; note = 2'-fluoro ribonucleotide
  modified_base 15: mod_base = OTHER; note = 2'-O-Methyl ribonucleotide
  modified_base 16: mod_base = OTHER; note = 2'-fluoro ribonucleotide
  modified_base 17..23: mod_base = OTHER; note = 2'-O-Methyl ribonucleotide
  modified_base 1..3: mod_base = OTHER; note = phosphorothioate linkage
  modified_base 21..23: mod_base = OTHER; note = phosphorothioate linkage
tttttatagagtataaccttcca

SEQ ID NO: 349 - RNA, 23 nt, synthetic construct
  source 1..23: mol_type = other RNA
  modified_base 1: mod_base = OTHER; note = 2'-O-Methyl ribonucleotide
  modified_base 2: mod_base = OTHER; note = 2'-fluoro ribonucleotide
  modified_base 3..6: mod_base = OTHER; note = 2'-O-Methyl ribonucleotide
  modified_base 7: mod_base = OTHER; note = 2'-fluoro ribonucleotide
  modified_base 8..11: mod_base = OTHER; note = 2'-O-Methyl ribonucleotide
  modified_base 12: mod_base = OTHER; note = 2'-fluoro ribonucleotide
  modified_base 13: mod_base = OTHER; note = 2'-O-Methyl ribonucleotide
  modified_base 14: mod_base = OTHER; note = 2'-fluoro ribonucleotide
  modified_base 15: mod_base = OTHER; note = 2'-O-Methyl ribonucleotide
  modified_base 16: mod_base = OTHER; note = 2'-fluoro ribonucleotide
  modified_base 17..23: mod_base = OTHER; note = 2'-O-Methyl ribonucleotide
  modified_base 1..3: mod_base = OTHER; note = phosphorothioate linkage
  modified_base 21..23: mod_base = OTHER; note = phosphorothioate linkage
tgattttatagagtataaccttc

SEQ ID NO: 350 - RNA, 23 nt, synthetic construct
  source 1..23: mol_type = other RNA
  modified_base 1: mod_base = OTHER; note = 2'-O-Methyl ribonucleotide
  modified_base 2: mod_base = OTHER; note = 2'-fluoro ribonucleotide
  modified_base 3..6: mod_base = OTHER; note = 2'-O-Methyl ribonucleotide
  modified_base 7: mod_base = OTHER; note = 2'-fluoro ribonucleotide
  modified_base 8..11: mod_base = OTHER; note = 2'-O-Methyl ribonucleotide
  modified_base 12: mod_base = OTHER; note = 2'-fluoro ribonucleotide
  modified_base 13: mod_base = OTHER; note = 2'-O-Methyl ribonucleotide
  modified_base 14: mod_base = OTHER; note = 2'-fluoro ribonucleotide
  modified_base 15: mod_base = OTHER; note = 2'-O-Methyl ribonucleotide
  modified_base 16: mod_base = OTHER; note = 2'-fluoro ribonucleotide
  modified_base 17..23: mod_base = OTHER; note = 2'-O-Methyl ribonucleotide
  modified_base 1..3: mod_base = OTHER; note = phosphorothioate linkage
  modified_base 21..23: mod_base = OTHER; note = phosphorothioate linkage
tgatcaacattttggttgatttt

SEQ ID NO: 351 - RNA, 23 nt, synthetic construct
  source 1..23: mol_type = other RNA
  modified_base 1: mod_base = OTHER; note = 2'-O-Methyl ribonucleotide
  modified_base 2: mod_base = OTHER; note = 2'-fluoro ribonucleotide
  modified_base 3..6: mod_base = OTHER; note = 2'-O-Methyl ribonucleotide
  modified_base 7: mod_base = OTHER; note = 2'-fluoro ribonucleotide
  modified_base 8..11: mod_base = OTHER; note = 2'-O-Methyl ribonucleotide
  modified_base 12: mod_base = OTHER; note = 2'-fluoro ribonucleotide
  modified_base 13: mod_base = OTHER; note = 2'-O-Methyl ribonucleotide
  modified_base 14: mod_base = OTHER; note = 2'-fluoro ribonucleotide
  modified_base 15: mod_base = OTHER; note = 2'-O-Methyl ribonucleotide
  modified_base 16: mod_base = OTHER; note = 2'-fluoro ribonucleotide
  modified_base 17..23: mod_base = OTHER; note = 2'-O-Methyl ribonucleotide
  modified_base 1..3: mod_base = OTHER; note = phosphorothioate linkage
  modified_base 21..23: mod_base = OTHER; note = phosphorothioate linkage
tggatcaacattttggttgattt

SEQ ID NO: 352 - RNA, 23 nt, synthetic construct
  source 1..23: mol_type = other RNA
  modified_base 1: mod_base = OTHER; note = 2'-O-Methyl ribonucleotide
  modified_base 2: mod_base = OTHER; note = 2'-fluoro ribonucleotide
  modified_base 3..6: mod_base = OTHER; note = 2'-O-Methyl ribonucleotide
  modified_base 7: mod_base = OTHER; note = 2'-fluoro ribonucleotide
  modified_base 8..11: mod_base = OTHER; note = 2'-O-Methyl ribonucleotide
  modified_base 12: mod_base = OTHER; note = 2'-fluoro ribonucleotide
  modified_base 13: mod_base = OTHER; note = 2'-O-Methyl ribonucleotide
  modified_base 14: mod_base = OTHER; note = 2'-fluoro ribonucleotide
  modified_base 15: mod_base = OTHER; note = 2'-O-Methyl ribonucleotide
  modified_base 16: mod_base = OTHER; note = 2'-fluoro ribonucleotide
  modified_base 17..23: mod_base = OTHER; note = 2'-O-Methyl ribonucleotide
  modified_base 1..3: mod_base = OTHER; note = phosphorothioate linkage
  modified_base 21..23: mod_base = OTHER; note = phosphorothioate linkage
ttggatcaacattttggttgatt

SEQ ID NO: 353 - RNA, 23 nt, synthetic construct
  source 1..23: mol_type = other RNA
  modified_base 1: mod_base = OTHER; note = 2'-O-Methyl ribonucleotide
  modified_base 2: mod_base = OTHER; note = 2'-fluoro ribonucleotide
  modified_base 3..6: mod_base = OTHER; note = 2'-O-Methyl ribonucleotide
  modified_base 7: mod_base = OTHER; note = 2'-fluoro ribonucleotide
  modified_base 8..11: mod_base = OTHER; note = 2'-O-Methyl ribonucleotide
  modified_base 12: mod_base = OTHER; note = 2'-fluoro ribonucleotide
  modified_base 13: mod_base = OTHER; note = 2'-O-Methyl ribonucleotide
  modified_base 14: mod_base = OTHER; note = 2'-fluoro ribonucleotide
  modified_base 15: mod_base = OTHER; note = 2'-O-Methyl ribonucleotide
  modified_base 16: mod_base = OTHER; note = 2'-fluoro ribonucleotide
  modified_base 17..23: mod_base = OTHER; note = 2'-O-Methyl ribonucleotide
  modified_base 1..3: mod_base = OTHER; note = phosphorothioate linkage
  modified_base 21..23: mod_base = OTHER; note = phosphorothioate linkage
tatggatcaacattttggttgat

SEQ ID NO: 354 - RNA, 23 nt, synthetic construct
  source 1..23: mol_type = other RNA
  modified_base 1: mod_base = OTHER; note = 2'-O-Methyl ribonucleotide
  modified_base 2: mod_base = OTHER; note = 2'-fluoro ribonucleotide
  modified_base 3..6: mod_base = OTHER; note = 2'-O-Methyl ribonucleotide
  modified_base 7: mod_base = OTHER; note = 2'-fluoro ribonucleotide
  modified_base 8..11: mod_base = OTHER; note = 2'-O-Methyl ribonucleotide
  modified_base 12: mod_base = OTHER; note = 2'-fluoro ribonucleotide
  modified_base 13: mod_base = OTHER; note = 2'-O-Methyl ribonucleotide
  modified_base 14: mod_base = OTHER; note = 2'-fluoro ribonucleotide
  modified_base 15: mod_base = OTHER; note = 2'-O-Methyl ribonucleotide
  modified_base 16: mod_base = OTHER; note = 2'-fluoro ribonucleotide
  modified_base 17..23: mod_base = OTHER; note = 2'-O-Methyl ribonucleotide
  modified_base 1..3: mod_base = OTHER; note = phosphorothioate linkage
  modified_base 21..23: mod_base = OTHER; note = phosphorothioate linkage
tggatggatcaacattttggttg

SEQ ID NO: 355 - RNA, 23 nt, synthetic construct
  source 1..23: mol_type = other RNA
  modified_base 1: mod_base = OTHER; note = 2'-O-Methyl ribonucleotide
  modified_base 2: mod_base = OTHER; note = 2'-fluoro ribonucleotide
  modified_base 3..6: mod_base = OTHER; note = 2'-O-Methyl ribonucleotide
  modified_base 7: mod_base = OTHER; note = 2'-fluoro ribonucleotide
  modified_base 8..11: mod_base = OTHER; note = 2'-O-Methyl ribonucleotide
  modified_base 12: mod_base = OTHER; note = 2'-fluoro ribonucleotide
  modified_base 13: mod_base = OTHER; note = 2'-O-Methyl ribonucleotide
  modified_base 14: mod_base = OTHER; note = 2'-fluoro ribonucleotide
  modified_base 15: mod_base = OTHER; note = 2'-O-Methyl ribonucleotide
  modified_base 16: mod_base = OTHER; note = 2'-fluoro ribonucleotide
  modified_base 17..23: mod_base = OTHER; note = 2'-O-Methyl ribonucleotide
  modified_base 1..3: mod_base = OTHER; note = phosphorothioate linkage
  modified_base 21..23: mod_base = OTHER; note = phosphorothioate linkage
ttggatggatcaacattttggtt

SEQ ID NO: 356 - RNA, 23 nt, synthetic construct
  source 1..23: mol_type = other RNA
  modified_base 1: mod_base = OTHER; note = 2'-O-Methyl ribonucleotide
  modified_base 2: mod_base = OTHER; note = 2'-fluoro ribonucleotide
  modified_base 3..6: mod_base = OTHER; note = 2'-O-Methyl ribonucleotide
  modified_base 7: mod_base = OTHER; note = 2'-fluoro ribonucleotide
  modified_base 8..11: mod_base = OTHER; note = 2'-O-Methyl ribonucleotide
  modified_base 12: mod_base = OTHER; note = 2'-fluoro ribonucleotide
  modified_base 13: mod_base = OTHER; note = 2'-O-Methyl ribonucleotide
  modified_base 14: mod_base = OTHER; note = 2'-fluoro ribonucleotide
  modified_base 15: mod_base = OTHER; note = 2'-O-Methyl ribonucleotide
  modified_base 16: mod_base = OTHER; note = 2'-fluoro ribonucleotide
  modified_base 17..23: mod_base = OTHER; note = 2'-O-Methyl ribonucleotide
  modified_base 1..3: mod_base = OTHER; note = phosphorothioate linkage
  modified_base 21..23: mod_base = OTHER; note = phosphorothioate linkage
tcattaacttggaatgaggttaa

SEQ ID NO: 357 - RNA, 23 nt, synthetic construct
  source 1..23: mol_type = other RNA
  modified_base 1: mod_base = OTHER; note = 2'-O-Methyl ribonucleotide
  modified_base 2: mod_base = OTHER; note = 2'-fluoro ribonucleotide
  modified_base 3..6: mod_base = OTHER; note = 2'-O-Methyl ribonucleotide
  modified_base 7: mod_base = OTHER; note = 2'-fluoro ribonucleotide
  modified_base 8..11: mod_base = OTHER; note = 2'-O-Methyl ribonucleotide
  modified_base 12: mod_base = OTHER; note = 2'-fluoro ribonucleotide
  modified_base 13: mod_base = OTHER; note = 2'-O-Methyl ribonucleotide
  modified_base 14: mod_base = OTHER; note = 2'-fluoro ribonucleotide
  modified_base 15: mod_base = OTHER; note = 2'-O-Methyl ribonucleotide
  modified_base 16: mod_base = OTHER; note = 2'-fluoro ribonucleotide
  modified_base 17..23: mod_base = OTHER; note = 2'-O-Methyl ribonucleotide
  modified_base 1..3: mod_base = OTHER; note = phosphorothioate linkage
  modified_base 21..23: mod_base = OTHER; note = phosphorothioate linkage
taggatttaataccagattatta

SEQ ID NO: 358 - RNA, 23 nt, synthetic construct
  source 1..23: mol_type = other RNA
  modified_base 1: mod_base = OTHER; note = 2'-O-Methyl ribonucleotide
  modified_base 2: mod_base = OTHER; note = 2'-fluoro ribonucleotide
  modified_base 3..6: mod_base = OTHER; note = 2'-O-Methyl ribonucleotide
  modified_base 7: mod_base = OTHER; note = 2'-fluoro ribonucleotide
  modified_base 8..11: mod_base = OTHER; note = 2'-O-Methyl ribonucleotide
  modified_base 12: mod_base = OTHER; note = 2'-fluoro ribonucleotide
  modified_base 13: mod_base = OTHER; note = 2'-O-Methyl ribonucleotide
  modified_base 14: mod_base = OTHER; note = 2'-fluoro ribonucleotide
  modified_base 15: mod_base = OTHER; note = 2'-O-Methyl ribonucleotide
  modified_base 16: mod_base = OTHER; note = 2'-fluoro ribonucleotide
  modified_base 17..23: mod_base = OTHER; note = 2'-O-Methyl ribonucleotide
  modified_base 1..3: mod_base = OTHER; note = phosphorothioate linkage
  modified_base 21..23: mod_base = OTHER; note = phosphorothioate linkage
ttaaggatttaataccagattat

SEQ ID NO: 359 - RNA, 23 nt, synthetic construct
  source 1..23: mol_type = other RNA
  modified_base 1: mod_base = OTHER; note = 2'-O-Methyl ribonucleotide
  modified_base 2: mod_base = OTHER; note = 2'-fluoro ribonucleotide
  modified_base 3..6: mod_base = OTHER; note = 2'-O-Methyl ribonucleotide
  modified_base 7: mod_base = OTHER; note = 2'-fluoro ribonucleotide
  modified_base 8..11: mod_base = OTHER; note = 2'-O-Methyl ribonucleotide
  modified_base 12: mod_base = OTHER; note = 2'-fluoro ribonucleotide
  modified_base 13: mod_base = OTHER; note = 2'-O-Methyl ribonucleotide
  modified_base 14: mod_base = OTHER; note = 2'-fluoro ribonucleotide
  modified_base 15: mod_base = OTHER; note = 2'-O-Methyl ribonucleotide
  modified_base 16: mod_base = OTHER; note = 2'-fluoro ribonucleotide
  modified_base 17..23: mod_base = OTHER; note = 2'-O-Methyl ribonucleotide
  modified_base 1..3: mod_base = OTHER; note = phosphorothioate linkage
  modified_base 21..23: mod_base = OTHER; note = phosphorothioate linkage
tcttaaggatttaataccagatt

SEQ ID NO: 360 - RNA, 23 nt, synthetic construct
  source 1..23: mol_type = other RNA
  modified_base 1: mod_base = OTHER; note = 2'-O-Methyl ribonucleotide
  modified_base 2: mod_base = OTHER; note = 2'-fluoro ribonucleotide
  modified_base 3..6: mod_base = OTHER; note = 2'-O-Methyl ribonucleotide
  modified_base 7: mod_base = OTHER; note = 2'-fluoro ribonucleotide
  modified_base 8..11: mod_base = OTHER; note = 2'-O-Methyl ribonucleotide
  modified_base 12: mod_base = OTHER; note = 2'-fluoro ribonucleotide
  modified_base 13: mod_base = OTHER; note = 2'-O-Methyl ribonucleotide
  modified_base 14: mod_base = OTHER; note = 2'-fluoro ribonucleotide
  modified_base 15: mod_base = OTHER; note = 2'-O-Methyl ribonucleotide
  modified_base 16: mod_base = OTHER; note = 2'-fluoro ribonucleotide
  modified_base 17..23: mod_base = OTHER; note = 2'-O-Methyl ribonucleotide
  modified_base 1..3: mod_base = OTHER; note = phosphorothioate linkage
  modified_base 21..23: mod_base = OTHER; note = phosphorothioate linkage
tttgtatgtttaatcttaaatag

SEQ ID NO: 361 - RNA, 23 nt, synthetic construct
  source 1..23: mol_type = other RNA
  modified_base 1: mod_base = OTHER; note = 2'-O-Methyl ribonucleotide
  modified_base 2: mod_base = OTHER; note = 2'-fluoro ribonucleotide
  modified_base 3..6: mod_base = OTHER; note = 2'-O-Methyl ribonucleotide
  modified_base 7: mod_base = OTHER; note = 2'-fluoro ribonucleotide
  modified_base 8..11: mod_base = OTHER; note = 2'-O-Methyl ribonucleotide
  modified_base 12: mod_base = OTHER; note = 2'-fluoro ribonucleotide
  modified_base 13: mod_base = OTHER; note = 2'-O-Methyl ribonucleotide
  modified_base 14: mod_base = OTHER; note = 2'-fluoro ribonucleotide
  modified_base 15: mod_base = OTHER; note = 2'-O-Methyl ribonucleotide
  modified_base 16: mod_base = OTHER; note = 2'-fluoro ribonucleotide
  modified_base 17..23: mod_base = OTHER; note = 2'-O-Methyl ribonucleotide
  modified_base 1..3: mod_base = OTHER; note = phosphorothioate linkage
  modified_base 21..23: mod_base = OTHER; note = phosphorothioate linkage
ttgattgtatgtttaatcttaaa

SEQ ID NO: 362 - RNA, 23 nt, synthetic construct
  source 1..23: mol_type = other RNA
  modified_base 1: mod_base = OTHER; note = 2'-O-Methyl ribonucleotide
  modified_base 2: mod_base = OTHER; note = 2'-fluoro ribonucleotide
  modified_base 3..6: mod_base = OTHER; note = 2'-O-Methyl ribonucleotide
  modified_base 7: mod_base = OTHER; note = 2'-fluoro ribonucleotide
  modified_base 8..11: mod_base = OTHER; note = 2'-O-Methyl ribonucleotide
  modified_base 12: mod_base = OTHER; note = 2'-fluoro ribonucleotide
  modified_base 13: mod_base = OTHER; note = 2'-O-Methyl ribonucleotide
  modified_base 14: mod_base = OTHER; note = 2'-fluoro ribonucleotide
  modified_base 15: mod_base = OTHER; note = 2'-O-Methyl ribonucleotide
  modified_base 16: mod_base = OTHER; note = 2'-fluoro ribonucleotide
  modified_base 17..23: mod_base = OTHER; note = 2'-O-Methyl ribonucleotide
  modified_base 1..3: mod_base = OTHER; note = phosphorothioate linkage
  modified_base 21..23: mod_base = OTHER; note = phosphorothioate linkage
ttattctttaaggttatgtgatt

SEQ ID NO: 363 - RNA, 23 nt, synthetic construct
  source 1..23: mol_type = other RNA
  modified_base 1: mod_base = OTHER; note = 2'-O-Methyl ribonucleotide
  modified_base 2: mod_base = OTHER; note = 2'-fluoro ribonucleotide
  modified_base 3..6: mod_base = OTHER; note = 2'-O-Methyl ribonucleotide
  modified_base 7: mod_base = OTHER; note = 2'-fluoro ribonucleotide
  modified_base 8..11: mod_base = OTHER; note = 2'-O-Methyl ribonucleotide
  modified_base 12: mod_base = OTHER; note = 2'-fluoro ribonucleotide
  modified_base 13: mod_base = OTHER; note = 2'-O-Methyl ribonucleotide
  modified_base 14: mod_base = OTHER; note = 2'-fluoro ribonucleotide
  modified_base 15: mod_base = OTHER; note = 2'-O-Methyl ribonucleotide
  modified_base 16: mod_base = OTHER; note = 2'-fluoro ribonucleotide
  modified_base 17..23: mod_base = OTHER; note = 2'-O-Methyl ribonucleotide
  modified_base 1..3: mod_base = OTHER; note = phosphorothioate linkage
  modified_base 21..23: mod_base = OTHER; note = phosphorothioate linkage
taaattgattcccacatcacaaa

SEQ ID NO: 364 - RNA, 23 nt, synthetic construct
  source 1..23: mol_type = other RNA
  modified_base 1: mod_base = OTHER; note = 2'-O-Methyl ribonucleotide
  modified_base 2: mod_base = OTHER; note = 2'-fluoro ribonucleotide
  modified_base 3..6: mod_base = OTHER; note = 2'-O-Methyl ribonucleotide
  modified_base 7: mod_base = OTHER; note = 2'-fluoro ribonucleotide
  modified_base 8..11: mod_base = OTHER; note = 2'-O-Methyl ribonucleotide
  modified_base 12: mod_base = OTHER; note = 2'-fluoro ribonucleotide
  modified_base 13: mod_base = OTHER; note = 2'-O-Methyl ribonucleotide
  modified_base 14: mod_base = OTHER; note = 2'-fluoro ribonucleotide
  modified_base 15: mod_base = OTHER; note = 2'-O-Methyl ribonucleotide
  modified_base 16: mod_base = OTHER; note = 2'-fluoro ribonucleotide
  modified_base 17..23: mod_base = OTHER; note = 2'-O-Methyl ribonucleotide
  modified_base 1..3: mod_base = OTHER; note = phosphorothioate linkage
  modified_base 21..23: mod_base = OTHER; note = phosphorothioate linkage
taccatctaaaattgattcccac

SEQ ID NO: 365 - RNA, 23 nt, synthetic construct
  source 1..23: mol_type = other RNA
  modified_base 1: mod_base = OTHER; note = 2'-O-Methyl ribonucleotide
  modified_base 2: mod_base = OTHER; note = 2'-fluoro ribonucleotide
  modified_base 3..6: mod_base = OTHER; note = 2'-O-Methyl ribonucleotide
  modified_base 7: mod_base = OTHER; note = 2'-fluoro ribonucleotide
  modified_base 8..11: mod_base = OTHER; note = 2'-O-Methyl ribonucleotide
  modified_base 12: mod_base = OTHER; note = 2'-fluoro ribonucleotide
  modified_base 13: mod_base = OTHER; note = 2'-O-Methyl ribonucleotide
  modified_base 14: mod_base = OTHER; note = 2'-fluoro ribonucleotide
  modified_base 15: mod_base = OTHER; note = 2'-O-Methyl ribonucleotide
  modified_base 16: mod_base = OTHER; note = 2'-fluoro ribonucleotide
  modified_base 17..23: mod_base = OTHER; note = 2'-O-Methyl ribonucleotide
  modified_base 1..3: mod_base = OTHER; note = phosphorothioate linkage
  modified_base 21..23: mod_base = OTHER; note = phosphorothioate linkage
ttattagctcatatgatgccttt

SEQ ID NO: 366 - RNA, 23 nt, synthetic construct
  source 1..23: mol_type = other RNA
  modified_base 1: mod_base = OTHER; note = 2'-O-Methyl ribonucleotide
  modified_base 2: mod_base = OTHER; note = 2'-fluoro ribonucleotide
  modified_base 3..6: mod_base = OTHER; note = 2'-O-Methyl ribonucleotide
  modified_base 7: mod_base = OTHER; note = 2'-fluoro ribonucleotide
  modified_base 8..11: mod_base = OTHER; note = 2'-O-Methyl ribonucleotide
  modified_base 12: mod_base = OTHER; note = 2'-fluoro ribonucleotide
  modified_base 13: mod_base = OTHER; note = 2'-O-Methyl ribonucleotide
  modified_base 14: mod_base = OTHER; note = 2'-fluoro ribonucleotide
  modified_base 15: mod_base = OTHER; note = 2'-O-Methyl ribonucleotide
  modified_base 16: mod_base = OTHER; note = 2'-fluoro ribonucleotide
  modified_base 17..23: mod_base = OTHER; note = 2'-O-Methyl ribonucleotide
  modified_base 1..3: mod_base = OTHER; note = phosphorothioate linkage
  modified_base 21..23: mod_base = OTHER; note = phosphorothioate linkage
tgtgatattagctcatatgatgc

SEQ ID NO: 367 - RNA, 23 nt, synthetic construct
  source 1..23: mol_type = other RNA
  modified_base 1: mod_base = OTHER; note = 2'-O-Methyl ribonucleotide
  modified_base 2: mod_base = OTHER; note = 2'-fluoro ribonucleotide
  modified_base 3..6: mod_base = OTHER; note = 2'-O-Methyl ribonucleotide
  modified_base 7: mod_base = OTHER; note = 2'-fluoro ribonucleotide
  modified_base 8..11: mod_base = OTHER; note = 2'-O-Methyl ribonucleotide
  modified_base 12: mod_base = OTHER; note = 2'-fluoro ribonucleotide
  modified_base 13: mod_base = OTHER; note = 2'-O-Methyl ribonucleotide
  modified_base 14: mod_base = OTHER; note = 2'-fluoro ribonucleotide
  modified_base 15: mod_base = OTHER; note = 2'-O-Methyl ribonucleotide
  modified_base 16: mod_base = OTHER; note = 2'-fluoro ribonucleotide
  modified_base 17..23: mod_base = OTHER; note = 2'-O-Methyl ribonucleotide
  modified_base 1..3: mod_base = OTHER; note = phosphorothioate linkage
  modified_base 21..23: mod_base = OTHER; note = phosphorothioate linkage
ttgtgatattagctcatatgatg

SEQ ID NO: 368 - RNA, 23 nt, synthetic construct
  source 1..23: mol_type = other RNA
  modified_base 1: mod_base = OTHER; note = 2'-O-Methyl ribonucleotide
  modified_base 2: mod_base = OTHER; note = 2'-fluoro ribonucleotide
  modified_base 3..6: mod_base = OTHER; note = 2'-O-Methyl ribonucleotide
  modified_base 7: mod_base = OTHER; note = 2'-fluoro ribonucleotide
  modified_base 8..11: mod_base = OTHER; note = 2'-O-Methyl ribonucleotide
  modified_base 12: mod_base = OTHER; note = 2'-fluoro ribonucleotide
  modified_base 13: mod_base = OTHER; note = 2'-O-Methyl ribonucleotide
  modified_base 14: mod_base = OTHER; note = 2'-fluoro ribonucleotide
  modified_base 15: mod_base = OTHER; note = 2'-O-Methyl ribonucleotide
  modified_base 16: mod_base = OTHER; note = 2'-fluoro ribonucleotide
  modified_base 17..23: mod_base = OTHER; note = 2'-O-Methyl ribonucleotide
  modified_base 1..3: mod_base = OTHER; note = phosphorothioate linkage
  modified_base 21..23: mod_base = OTHER; note = phosphorothioate linkage
tgtcaagtttagagttttaacaa

SEQ ID NO: 369 - RNA, 23 nt, synthetic construct
  source 1..23: mol_type = other RNA
  modified_base 1: mod_base = OTHER; note = 2'-O-Methyl ribonucleotide
  modified_base 2: mod_base = OTHER; note = 2'-fluoro ribonucleotide
  modified_base 3..6: mod_base = OTHER; note = 2'-O-Methyl ribonucleotide
  modified_base 7: mod_base = OTHER; note = 2'-fluoro ribonucleotide
  modified_base 8..11: mod_base = OTHER; note = 2'-O-Methyl ribonucleotide
  modified_base 12: mod_base = OTHER; note = 2'-fluoro ribonucleotide
  modified_base 13: mod_base = OTHER; note = 2'-O-Methyl ribonucleotide
  modified_base 14: mod_base = OTHER; note = 2'-fluoro ribonucleotide
  modified_base 15: mod_base = OTHER; note = 2'-O-Methyl ribonucleotide
  modified_base 16: mod_base = OTHER; note = 2'-fluoro ribonucleotide
  modified_base 17..23: mod_base = OTHER; note = 2'-O-Methyl ribonucleotide
  modified_base 1..3: mod_base = OTHER; note = phosphorothioate linkage
  modified_base 21..23: mod_base = OTHER; note = phosphorothioate linkage
ttagtcaagtttagagttttaac

SEQ ID NO: 370 - RNA, 23 nt, synthetic construct
  source 1..23: mol_type = other RNA
  modified_base 1: mod_base = OTHER; note = 2'-O-Methyl ribonucleotide
  modified_base 2: mod_base = OTHER; note = 2'-fluoro ribonucleotide
  modified_base 3..6: mod_base = OTHER; note = 2'-O-Methyl ribonucleotide
  modified_base 7: mod_base = OTHER; note = 2'-fluoro ribonucleotide
  modified_base 8..11: mod_base = OTHER; note = 2'-O-Methyl ribonucleotide
  modified_base 12: mod_base = OTHER; note = 2'-fluoro ribonucleotide
  modified_base 13: mod_base = OTHER; note = 2'-O-Methyl ribonucleotide
  modified_base 14: mod_base = OTHER; note = 2'-fluoro ribonucleotide
  modified_base 15: mod_base = OTHER; note = 2'-O-Methyl ribonucleotide
  modified_base 16: mod_base = OTHER; note = 2'-fluoro ribonucleotide
  modified_base 17..23: mod_base = OTHER; note = 2'-O-Methyl ribonucleotide
  modified_base 1..3: mod_base = OTHER; note = phosphorothioate linkage
  modified_base 21..23: mod_base = OTHER; note = phosphorothioate linkage
ttatttagtcaagtttagagttt

SEQ ID NO: 371 - RNA, 23 nt, synthetic construct
  source 1..23: mol_type = other RNA
  modified_base 1: mod_base = OTHER; note = 2'-O-Methyl ribonucleotide
  modified_base 2: mod_base = OTHER; note = 2'-fluoro ribonucleotide
  modified_base 3..6: mod_base = OTHER; note = 2'-O-Methyl ribonucleotide
  modified_base 7: mod_base = OTHER; note = 2'-fluoro ribonucleotide
  modified_base 8..11: mod_base = OTHER; note = 2'-O-Methyl ribonucleotide
  modified_base 12: mod_base = OTHER; note = 2'-fluoro ribonucleotide
  modified_base 13: mod_base = OTHER; note = 2'-O-Methyl ribonucleotide
  modified_base 14: mod_base = OTHER; note = 2'-fluoro ribonucleotide
  modified_base 15: mod_base = OTHER; note = 2'-O-Methyl ribonucleotide
  modified_base 16: mod_base = OTHER; note = 2'-fluoro ribonucleotide
  modified_base 17..23: mod_base = OTHER; note = 2'-O-Methyl ribonucleotide
  modified_base 1..3: mod_base = OTHER; note = phosphorothioate linkage
  modified_base 21..23: mod_base = OTHER; note = phosphorothioate linkage
tacatactctgtgctgacgattt

SEQ ID NO: 372 - RNA, 23 nt, synthetic construct
  source 1..23: mol_type = other RNA
  modified_base 1: mod_base = OTHER; note = 2'-O-Methyl ribonucleotide
  modified_base 2: mod_base = OTHER; note = 2'-fluoro ribonucleotide
  modified_base 3..6: mod_base = OTHER; note = 2'-O-Methyl ribonucleotide
  modified_base 7: mod_base = OTHER; note = 2'-fluoro ribonucleotide
  modified_base 8..11: mod_base = OTHER; note = 2'-O-Methyl ribonucleotide
  modified_base 12: mod_base = OTHER; note = 2'-fluoro ribonucleotide
  modified_base 13: mod_base = OTHER; note = 2'-O-Methyl ribonucleotide
  modified_base 14: mod_base = OTHER; note = 2'-fluoro ribonucleotide
  modified_base 15: mod_base = OTHER; note = 2'-O-Methyl ribonucleotide
  modified_base 16: mod_base = OTHER; note = 2'-fluoro ribonucleotide
  modified_base 17..23: mod_base = OTHER; note = 2'-O-Methyl ribonucleotide
  modified_base 1..3: mod_base = OTHER; note = phosphorothioate linkage
  modified_base 21..23: mod_base = OTHER; note = phosphorothioate linkage
tgtcaatgtgacttagtagtcat

SEQ ID NO: 373 - RNA, 23 nt, synthetic construct
  source 1..23: mol_type = other RNA
  modified_base 1: mod_base = OTHER; note = 2'-O-Methyl ribonucleotide
  modified_base 2: mod_base = OTHER; note = 2'-fluoro ribonucleotide
  modified_base 3..6: mod_base = OTHER; note = 2'-O-Methyl ribonucleotide
  modified_base 7: mod_base = OTHER; note = 2'-fluoro ribonucleotide
  modified_base 8..11: mod_base = OTHER; note = 2'-O-Methyl ribonucleotide
  modified_base 12: mod_base = OTHER; note = 2'-fluoro ribonucleotide
  modified_base 13: mod_base = OTHER; note = 2'-O-Methyl ribonucleotide
  modified_base 14: mod_base = OTHER; note = 2'-fluoro ribonucleotide
  modified_base 15: mod_base = OTHER; note = 2'-O-Methyl ribonucleotide
  modified_base 16: mod_base = OTHER; note = 2'-fluoro ribonucleotide
  modified_base 17..23: mod_base = OTHER; note = 2'-O-Methyl ribonucleotide
  modified_base 1..3: mod_base = OTHER; note = phosphorothioate linkage
  modified_base 21..23: mod_base = OTHER; note = phosphorothioate linkage
tggtatagtgatacctcatgtta

SEQ ID NO: 374 - RNA, 23 nt, synthetic construct
  source 1..23: mol_type = other RNA
  modified_base 1: mod_base = OTHER; note = 2'-O-Methyl ribonucleotide
  modified_base 2: mod_base = OTHER; note = 2'-fluoro ribonucleotide
  modified_base 3..6: mod_base = OTHER; note = 2'-O-Methyl ribonucleotide
  modified_base 7: mod_base = OTHER; note = 2'-fluoro ribonucleotide
  modified_base 8..11: mod_base = OTHER; note = 2'-O-Methyl ribonucleotide
  modified_base 12: mod_base = OTHER; note = 2'-fluoro ribonucleotide
  modified_base 13: mod_base = OTHER; note = 2'-O-Methyl ribonucleotide
  modified_base 14: mod_base = OTHER; note = 2'-fluoro ribonucleotide
  modified_base 15: mod_base = OTHER; note = 2'-O-Methyl ribonucleotide
  modified_base 16: mod_base = OTHER; note = 2'-fluoro ribonucleotide
  modified_base 17..23: mod_base = OTHER; note = 2'-O-Methyl ribonucleotide
  modified_base 1..3: mod_base = OTHER; note = phosphorothioate linkage
  modified_base 21..23: mod_base = OTHER; note = phosphorothioate linkage
ttaaactttaactcgatgccaca

SEQ ID NO: 375 - RNA, 23 nt, synthetic construct
  source 1..23: mol_type = other RNA
  modified_base 1: mod_base = OTHER; note = 2'-O-Methyl ribonucleotide
  modified_base 2: mod_base = OTHER; note = 2'-fluoro ribonucleotide
  modified_base 3..6: mod_base = OTHER; note = 2'-O-Methyl ribonucleotide
  modified_base 7: mod_base = OTHER; note = 2'-fluoro ribonucleotide
  modified_base 8..11: mod_base = OTHER; note = 2'-O-Methyl ribonucleotide
  modified_base 12: mod_base = OTHER; note = 2'-fluoro ribonucleotide
  modified_base 13: mod_base = OTHER; note = 2'-O-Methyl ribonucleotide
  modified_base 14: mod_base = OTHER; note = 2'-fluoro ribonucleotide
  modified_base 15: mod_base = OTHER; note = 2'-O-Methyl ribonucleotide
  modified_base 16: mod_base = OTHER; note = 2'-fluoro ribonucleotide
  modified_base 17..23: mod_base = OTHER; note = 2'-O-Methyl ribonucleotide
  modified_base 1..3: mod_base = OTHER; note = phosphorothioate linkage
  modified_base 21..23: mod_base = OTHER; note = phosphorothioate linkage
tataaactttaactcgatgccac

SEQ ID NO: 376 - RNA, 23 nt, synthetic construct
  source 1..23: mol_type = other RNA
  modified_base 1: mod_base = OTHER; note = 2'-O-Methyl ribonucleotide
  modified_base 2: mod_base = OTHER; note = 2'-fluoro ribonucleotide
  modified_base 3..6: mod_base = OTHER; note = 2'-O-Methyl ribonucleotide
  modified_base 7: mod_base = OTHER; note = 2'-fluoro ribonucleotide
  modified_base 8..11: mod_base = OTHER; note = 2'-O-Methyl ribonucleotide
  modified_base 12: mod_base = OTHER; note = 2'-fluoro ribonucleotide
  modified_base 13: mod_base = OTHER; note = 2'-O-Methyl ribonucleotide
  modified_base 14: mod_base = OTHER; note = 2'-fluoro ribonucleotide
  modified_base 15: mod_base = OTHER; note = 2'-O-Methyl ribonucleotide
  modified_base 16: mod_base = OTHER; note = 2'-fluoro ribonucleotide
  modified_base 17..23: mod_base = OTHER; note = 2'-O-Methyl ribonucleotide
  modified_base 1..3: mod_base = OTHER; note = phosphorothioate linkage
  modified_base 21..23: mod_base = OTHER; note = phosphorothioate linkage
ttaggggaaatataaactttaac

SEQ ID NO: 377 - RNA, 23 nt, synthetic construct
  source 1..23: mol_type = other RNA
  modified_base 1: mod_base = OTHER; note = 2'-O-Methyl ribonucleotide
  modified_base 2: mod_base = OTHER; note = 2'-fluoro ribonucleotide
  modified_base 3..6: mod_base = OTHER; note = 2'-O-Methyl ribonucleotide
  modified_base 7: mod_base = OTHER; note = 2'-fluoro ribonucleotide
  modified_base 8..11: mod_base = OTHER; note = 2'-O-Methyl ribonucleotide
  modified_base 12: mod_base = OTHER; note = 2'-fluoro ribonucleotide
  modified_base 13: mod_base = OTHER; note = 2'-O-Methyl ribonucleotide
  modified_base 14: mod_base = OTHER; note = 2'-fluoro ribonucleotide
  modified_base 15: mod_base = OTHER; note = 2'-O-Methyl ribonucleotide
  modified_base 16: mod_base = OTHER; note = 2'-fluoro ribonucleotide
  modified_base 17..23: mod_base = OTHER; note = 2'-O-Methyl ribonucleotide
  modified_base 1..3: mod_base = OTHER; note = phosphorothioate linkage
  modified_base 21..23: mod_base = OTHER; note = phosphorothioate linkage
tcctttaacaaatgggtttaatt

SEQ ID NO: 378 - RNA, 23 nt, synthetic construct
  source 1..23: mol_type = other RNA
  modified_base 1: mod_base = OTHER; note = 2'-O-Methyl ribonucleotide
  modified_base 2: mod_base = OTHER; note = 2'-fluoro ribonucleotide
  modified_base 3..6: mod_base = OTHER; note = 2'-O-Methyl ribonucleotide
  modified_base 7: mod_base = OTHER; note = 2'-fluoro ribonucleotide
  modified_base 8..11: mod_base = OTHER; note = 2'-O-Methyl ribonucleotide
  modified_base 12: mod_base = OTHER; note = 2'-fluoro ribonucleotide
  modified_base 13: mod_base = OTHER; note = 2'-O-Methyl ribonucleotide
  modified_base 14: mod_base = OTHER; note = 2'-fluoro ribonucleotide
  modified_base 15: mod_base = OTHER; note = 2'-O-Methyl ribonucleotide
  modified_base 16: mod_base = OTHER; note = 2'-fluoro ribonucleotide
  modified_base 17..23: mod_base = OTHER; note = 2'-O-Methyl ribonucleotide
  modified_base 1..3: mod_base = OTHER; note = phosphorothioate linkage
  modified_base 21..23: mod_base = OTHER; note = phosphorothioate linkage
tcactatatcctttaacaaatgg

SEQ ID NO: 379 - RNA, 23 nt, synthetic construct
  source 1..23: mol_type = other RNA
  modified_base 1: mod_base = OTHER; note = 2'-O-Methyl ribonucleotide
  modified_base 2: mod_base = OTHER; note = 2'-fluoro ribonucleotide
  modified_base 3..6: mod_base = OTHER; note = 2'-O-Methyl ribonucleotide
  modified_base 7: mod_base = OTHER; note = 2'-fluoro ribonucleotide
  modified_base 8..11: mod_base = OTHER; note = 2'-O-Methyl ribonucleotide
  modified_base 12: mod_base = OTHER; note = 2'-fluoro ribonucleotide
  modified_base 13: mod_base = OTHER; note = 2'-O-Methyl ribonucleotide
  modified_base 14: mod_base = OTHER; note = 2'-fluoro ribonucleotide
  modified_base 15: mod_base = OTHER; note = 2'-O-Methyl ribonucleotide
  modified_base 16: mod_base = OTHER; note = 2'-fluoro ribonucleotide
  modified_base 17..23: mod_base = OTHER; note = 2'-O-Methyl ribonucleotide
  modified_base 1..3: mod_base = OTHER; note = phosphorothioate linkage
  modified_base 21..23: mod_base = OTHER; note = phosphorothioate linkage
tgcactatatcctttaacaaatg

SEQ ID NO: 380 - RNA, 23 nt, synthetic construct
  source 1..23: mol_type = other RNA
  modified_base 1: mod_base = OTHER; note = 2'-O-Methyl ribonucleotide
  modified_base 2: mod_base = OTHER; note = 2'-fluoro ribonucleotide
  modified_base 3..6: mod_base = OTHER; note = 2'-O-Methyl ribonucleotide
  modified_base 7: mod_base = OTHER; note = 2'-fluoro ribonucleotide
  modified_base 8..11: mod_base = OTHER; note = 2'-O-Methyl ribonucleotide
  modified_base 12: mod_base = OTHER; note = 2'-fluoro ribonucleotide
  modified_base 13: mod_base = OTHER; note = 2'-O-Methyl ribonucleotide
  modified_base 14: mod_base = OTHER; note = 2'-fluoro ribonucleotide
  modified_base 15: mod_base = OTHER; note = 2'-O-Methyl ribonucleotide
  modified_base 16: mod_base = OTHER; note = 2'-fluoro ribonucleotide
  modified_base 17..23: mod_base = OTHER; note = 2'-O-Methyl ribonucleotide
  modified_base 1..3: mod_base = OTHER; note = phosphorothioate linkage
  modified_base 21..23: mod_base = OTHER; note = phosphorothioate linkage
tgggcactatatcctttaacaaa

SEQ ID NO: 381 - RNA, 23 nt, synthetic construct
  source 1..23: mol_type = other RNA
  modified_base 1: mod_base = OTHER; note = 2'-O-Methyl ribonucleotide
  modified_base 2: mod_base = OTHER; note = 2'-fluoro ribonucleotide
  modified_base 3..6: mod_base = OTHER; note = 2'-O-Methyl ribonucleotide
  modified_base 7: mod_base = OTHER; note = 2'-fluoro ribonucleotide
  modified_base 8..11: mod_base = OTHER; note = 2'-O-Methyl ribonucleotide
  modified_base 12: mod_base = OTHER; note = 2'-fluoro ribonucleotide
  modified_base 13: mod_base = OTHER; note = 2'-O-Methyl ribonucleotide
  modified_base 14: mod_base = OTHER; note = 2'-fluoro ribonucleotide
  modified_base 15: mod_base = OTHER; note = 2'-O-Methyl ribonucleotide
  modified_base 16: mod_base = OTHER; note = 2'-fluoro ribonucleotide
  modified_base 17..23: mod_base = OTHER; note = 2'-O-Methyl ribonucleotide
  modified_base 1..3: mod_base = OTHER; note = phosphorothioate linkage
  modified_base 21..23: mod_base = OTHER; note = phosphorothioate linkage
ttgggcactatatcctttaacaa

SEQ ID NO: 382 - RNA, 23 nt, synthetic construct
  source 1..23: mol_type = other RNA
  modified_base 1: mod_base = OTHER; note = 2'-O-Methyl ribonucleotide
  modified_base 2: mod_base = OTHER; note = 2'-fluoro ribonucleotide
  modified_base 3..6: mod_base = OTHER; note = 2'-O-Methyl ribonucleotide
  modified_base 7: mod_base = OTHER; note = 2'-fluoro ribonucleotide
  modified_base 8..11: mod_base = OTHER; note = 2'-O-Methyl ribonucleotide
  modified_base 12: mod_base = OTHER; note = 2'-fluoro ribonucleotide
  modified_base 13: mod_base = OTHER; note = 2'-O-Methyl ribonucleotide
  modified_base 14: mod_base = OTHER; note = 2'-fluoro ribonucleotide
  modified_base 15: mod_base = OTHER; note = 2'-O-Methyl ribonucleotide
  modified_base 16: mod_base = OTHER; note = 2'-fluoro ribonucleotide
  modified_base 17..23: mod_base = OTHER; note = 2'-O-Methyl ribonucleotide
  modified_base 1..3: mod_base = OTHER; note = phosphorothioate linkage
  modified_base 21..23: mod_base = OTHER; note = phosphorothioate linkage
taacttgggcactatatccttta

SEQ ID NO: 383 - RNA, 23 nt, synthetic construct
  source 1..23: mol_type = other RNA
  modified_base 1: mod_base = OTHER; note = 2'-O-Methyl ribonucleotide
  modified_base 2: mod_base = OTHER; note = 2'-fluoro ribonucleotide
  modified_base 3..6: mod_base = OTHER; note = 2'-O-Methyl ribonucleotide
  modified_base 7: mod_base = OTHER; note = 2'-fluoro ribonucleotide
  modified_base 8..11: mod_base = OTHER; note = 2'-O-Methyl ribonucleotide
  modified_base 12: mod_base = OTHER; note = 2'-fluoro ribonucleotide
  modified_base 13: mod_base = OTHER; note = 2'-O-Methyl ribonucleotide
  modified_base 14: mod_base = OTHER; note = 2'-fluoro ribonucleotide
  modified_base 15: mod_base = OTHER; note = 2'-O-Methyl ribonucleotide
  modified_base 16: mod_base = OTHER; note = 2'-fluoro ribonucleotide
  modified_base 17..23: mod_base = OTHER; note = 2'-O-Methyl ribonucleotide
  modified_base 1..3: mod_base = OTHER; note = phosphorothioate linkage
  modified_base 21..23: mod_base = OTHER; note = phosphorothioate linkage
ttaacttgggcactatatccttt

SEQ ID NO: 384 - RNA, 23 nt, synthetic construct
  source 1..23: mol_type = other RNA
  modified_base 1: mod_base = OTHER; note = 2'-O-Methyl ribonucleotide
  modified_base 2: mod_base = OTHER; note = 2'-fluoro ribonucleotide
  modified_base 3..6: mod_base = OTHER; note = 2'-O-Methyl ribonucleotide
  modified_base 7: mod_base = OTHER; note = 2'-fluoro ribonucleotide
  modified_base 8..11: mod_base = OTHER; note = 2'-O-Methyl ribonucleotide
  modified_base 12: mod_base = OTHER; note = 2'-fluoro ribonucleotide
  modified_base 13: mod_base = OTHER; note = 2'-O-Methyl ribonucleotide
  modified_base 14: mod_base = OTHER; note = 2'-fluoro ribonucleotide
  modified_base 15: mod_base = OTHER; note = 2'-O-Methyl ribonucleotide
  modified_base 16: mod_base = OTHER; note = 2'-fluoro ribonucleotide
  modified_base 17..23: mod_base = OTHER; note = 2'-O-Methyl ribonucleotide
  modified_base 1..3: mod_base = OTHER; note = phosphorothioate linkage
  modified_base 21..23: mod_base = OTHER; note = phosphorothioate linkage
tataacttgggcactatatcctt

SEQ ID NO: 385 - RNA, 23 nt, synthetic construct
  source 1..23: mol_type = other RNA
  modified_base 1: mod_base = OTHER; note = 2'-O-Methyl ribonucleotide
  modified_base 2: mod_base = OTHER; note = 2'-fluoro ribonucleotide
  modified_base 3..6: mod_base = OTHER; note = 2'-O-Methyl ribonucleotide
  modified_base 7: mod_base = OTHER; note = 2'-fluoro ribonucleotide
  modified_base 8..11: mod_base = OTHER; note = 2'-O-Methyl ribonucleotide
  modified_base 12: mod_base = OTHER; note = 2'-fluoro ribonucleotide
  modified_base 13: mod_base = OTHER; note = 2'-O-Methyl ribonucleotide
  modified_base 14: mod_base = OTHER; note = 2'-fluoro ribonucleotide
  modified_base 15: mod_base = OTHER; note = 2'-O-Methyl ribonucleotide
  modified_base 16: mod_base = OTHER; note = 2'-fluoro ribonucleotide
  modified_base 17..23: mod_base = OTHER; note = 2'-O-Methyl ribonucleotide
  modified_base 1..3: mod_base = OTHER; note = phosphorothioate linkage
  modified_base 21..23: mod_base = OTHER; note = phosphorothioate linkage
ttataacttgggcactatatcct

SEQ ID NO: 386 - RNA, 23 nt, synthetic construct
  source 1..23: mol_type = other RNA
  modified_base 1: mod_base = OTHER; note = 2'-O-Methyl ribonucleotide
  modified_base 2: mod_base = OTHER; note = 2'-fluoro ribonucleotide
  modified_base 3..6: mod_base = OTHER; note = 2'-O-Methyl ribonucleotide
  modified_base 7: mod_base = OTHER; note = 2'-fluoro ribonucleotide
  modified_base 8..11: mod_base = OTHER; note = 2'-O-Methyl ribonucleotide
  modified_base 12: mod_base = OTHER; note = 2'-fluoro ribonucleotide
  modified_base 13: mod_base = OTHER; note = 2'-O-Methyl ribonucleotide
  modified_base 14: mod_base = OTHER; note = 2'-fluoro ribonucleotide
  modified_base 15: mod_base = OTHER; note = 2'-O-Methyl ribonucleotide
  modified_base 16: mod_base = OTHER; note = 2'-fluoro ribonucleotide
  modified_base 17..23: mod_base = OTHER; note = 2'-O-Methyl ribonucleotide
  modified_base 1..3: mod_base = OTHER; note = phosphorothioate linkage
  modified_base 21..23: mod_base = OTHER; note = phosphorothioate linkage
ttgacaaaggtaggtcaccatat

SEQ ID NO: 387 - RNA, 23 nt, synthetic construct
  source 1..23: mol_type = other RNA
  modified_base 1: mod_base = OTHER; note = 2'-O-Methyl ribonucleotide
  modified_base 2: mod_base = OTHER; note = 2'-fluoro ribonucleotide
  modified_base 3..6: mod_base = OTHER; note = 2'-O-Methyl ribonucleotide
  modified_base 7: mod_base = OTHER; note = 2'-fluoro ribonucleotide
  modified_base 8..11: mod_base = OTHER; note = 2'-O-Methyl ribonucleotide
  modified_base 12: mod_base = OTHER; note = 2'-fluoro ribonucleotide
  modified_base 13: mod_base = OTHER; note = 2'-O-Methyl ribonucleotide
  modified_base 14: mod_base = OTHER; note = 2'-fluoro ribonucleotide
  modified_base 15: mod_base = OTHER; note = 2'-O-Methyl ribonucleotide
  modified_base 16: mod_base = OTHER; note = 2'-fluoro ribonucleotide
  modified_base 17..23: mod_base = OTHER; note = 2'-O-Methyl ribonucleotide
  modified_base 1..3: mod_base = OTHER; note = phosphorothioate linkage
  modified_base 21..23: mod_base = OTHER; note = phosphorothioate linkage
tttgacaaaggtaggtcaccata

SEQ ID NO: 388 - RNA, 23 nt, synthetic construct
  source 1..23: mol_type = other RNA
  modified_base 1: mod_base = OTHER; note = 2'-O-Methyl ribonucleotide
  modified_base 2: mod_base = OTHER; note = 2'-fluoro ribonucleotide
  modified_base 3..6: mod_base = OTHER; note = 2'-O-Methyl ribonucleotide
  modified_base 7: mod_base = OTHER; note = 2'-fluoro ribonucleotide
  modified_base 8..11: mod_base = OTHER; note = 2'-O-Methyl ribonucleotide
  modified_base 12: mod_base = OTHER; note = 2'-fluoro ribonucleotide
  modified_base 13: mod_base = OTHER; note = 2'-O-Methyl ribonucleotide
  modified_base 14: mod_base = OTHER; note = 2'-fluoro ribonucleotide
  modified_base 15: mod_base = OTHER; note = 2'-O-Methyl ribonucleotide
  modified_base 16: mod_base = OTHER; note = 2'-fluoro ribonucleotide
  modified_base 17..23: mod_base = OTHER; note = 2'-O-Methyl ribonucleotide
  modified_base 1..3: mod_base = OTHER; note = phosphorothioate linkage
  modified_base 21..23: mod_base = OTHER; note = phosphorothioate linkage
tattgacaaaggtaggtcaccat

SEQ ID NO: 389 - RNA, 23 nt, synthetic construct
  source 1..23: mol_type = other RNA
  modified_base 1: mod_base = OTHER; note = 2'-O-Methyl ribonucleotide
  modified_base 2: mod_base = OTHER; note = 2'-fluoro ribonucleotide
  modified_base 3..6: mod_base = OTHER; note = 2'-O-Methyl ribonucleotide
  modified_base 7: mod_base = OTHER; note = 2'-fluoro ribonucleotide
  modified_base 8..11: mod_base = OTHER; note = 2'-O-Methyl ribonucleotide
  modified_base 12: mod_base = OTHER; note = 2'-fluoro ribonucleotide
  modified_base 13: mod_base = OTHER; note = 2'-O-Methyl ribonucleotide
  modified_base 14: mod_base = OTHER; note = 2'-fluoro ribonucleotide
  modified_base 15: mod_base = OTHER; note = 2'-O-Methyl ribonucleotide
  modified_base 16: mod_base = OTHER; note = 2'-fluoro ribonucleotide
  modified_base 17..23: mod_base = OTHER; note = 2'-O-Methyl ribonucleotide
  modified_base 1..3: mod_base = OTHER; note = phosphorothioate linkage
  modified_base 21..23: mod_base = OTHER; note = phosphorothioate linkage
tgacatgtatattggataatttg

SEQ ID NO: 390 - RNA, 23 nt, synthetic construct
  source 1..23: mol_type = other RNA
  modified_base 1: mod_base = OTHER; note = 2'-O-Methyl ribonucleotide
  modified_base 2: mod_base = OTHER; note = 2'-fluoro ribonucleotide
  modified_base 3..6: mod_base = OTHER; note = 2'-O-Methyl ribonucleotide
  modified_base 7: mod_base = OTHER; note = 2'-fluoro ribonucleotide
  modified_base 8..11: mod_base = OTHER; note = 2'-O-Methyl ribonucleotide
  modified_base 12: mod_base = OTHER; note = 2'-fluoro ribonucleotide
  modified_base 13: mod_base = OTHER; note = 2'-O-Methyl ribonucleotide
  modified_base 14: mod_base = OTHER; note = 2'-fluoro ribonucleotide
  modified_base 15: mod_base = OTHER; note = 2'-O-Methyl ribonucleotide
  modified_base 16: mod_base = OTHER; note = 2'-fluoro ribonucleotide
  modified_base 17..23: mod_base = OTHER; note = 2'-O-Methyl ribonucleotide
  modified_base 1..3: mod_base = OTHER; note = phosphorothioate linkage
  modified_base 21..23: mod_base = OTHER; note = phosphorothioate linkage
ttagtctgtggtcctgaaaatta

SEQ ID NO: 391 - RNA, 23 nt, synthetic construct
  source 1..23: mol_type = other RNA
  modified_base 1: mod_base = OTHER; note = 2'-O-Methyl ribonucleotide
  modified_base 2: mod_base = OTHER; note = 2'-fluoro ribonucleotide
  modified_base 3..6: mod_base = OTHER; note = 2'-O-Methyl ribonucleotide
  modified_base 7: mod_base = OTHER; note = 2'-fluoro ribonucleotide
  modified_base 8..11: mod_base = OTHER; note = 2'-O-Methyl ribonucleotide
  modified_base 12: mod_base = OTHER; note = 2'-fluoro ribonucleotide
  modified_base 13: mod_base = OTHER; note = 2'-O-Methyl ribonucleotide
  modified_base 14: mod_base = OTHER; note = 2'-fluoro ribonucleotide
  modified_base 15: mod_base = OTHER; note = 2'-O-Methyl ribonucleotide
  modified_base 16: mod_base = OTHER; note = 2'-fluoro ribonucleotide
  modified_base 17..23: mod_base = OTHER; note = 2'-O-Methyl ribonucleotide
  modified_base 1..3: mod_base = OTHER; note = phosphorothioate linkage
  modified_base 21..23: mod_base = OTHER; note = phosphorothioate linkage
tgcttagtctgtggtcctgaaaa

SEQ ID NO: 392 - RNA, 23 nt, synthetic construct
  source 1..23: mol_type = other RNA
  modified_base 1: mod_base = OTHER; note = 2'-O-Methyl ribonucleotide
  modified_base 2: mod_base = OTHER; note = 2'-fluoro ribonucleotide
  modified_base 3..6: mod_base = OTHER; note = 2'-O-Methyl ribonucleotide
  modified_base 7: mod_base = OTHER; note = 2'-fluoro ribonucleotide
  modified_base 8..11: mod_base = OTHER; note = 2'-O-Methyl ribonucleotide
  modified_base 12: mod_base = OTHER; note = 2'-fluoro ribonucleotide
  modified_base 13: mod_base = OTHER; note = 2'-O-Methyl ribonucleotide
  modified_base 14: mod_base = OTHER; note = 2'-fluoro ribonucleotide
  modified_base 15: mod_base = OTHER; note = 2'-O-Methyl ribonucleotide
  modified_base 16: mod_base = OTHER; note = 2'-fluoro ribonucleotide
  modified_base 17..23: mod_base = OTHER; note = 2'-O-Methyl ribonucleotide
  modified_base 1..3: mod_base = OTHER; note = phosphorothioate linkage
  modified_base 21..23: mod_base = OTHER; note = phosphorothioate linkage
tacagcttagtctgtggtcctga

SEQ ID NO: 393 - RNA, 23 nt, synthetic construct
  source 1..23: mol_type = other RNA
  modified_base 1: mod_base = OTHER; note = 2'-O-Methyl ribonucleotide
  modified_base 2: mod_base = OTHER; note = 2'-fluoro ribonucleotide
  modified_base 3..6: mod_base = OTHER; note = 2'-O-Methyl ribonucleotide
  modified_base 7: mod_base = OTHER; note = 2'-fluoro ribonucleotide
  modified_base 8..11: mod_base = OTHER; note = 2'-O-Methyl ribonucleotide
  modified_base 12: mod_base = OTHER; note = 2'-fluoro ribonucleotide
  modified_base 13: mod_base = OTHER; note = 2'-O-Methyl ribonucleotide
  modified_base 14: mod_base = OTHER; note = 2'-fluoro ribonucleotide
  modified_base 15: mod_base = OTHER; note = 2'-O-Methyl ribonucleotide
  modified_base 16: mod_base = OTHER; note = 2'-fluoro ribonucleotide
  modified_base 17..23: mod_base = OTHER; note = 2'-O-Methyl ribonucleotide
  modified_base 1..3: mod_base = OTHER; note = phosphorothioate linkage
  modified_base 21..23: mod_base = OTHER; note = phosphorothioate linkage
tgtattctggccctaaaaaaatc

SEQ ID NO: 394 - RNA, 23 nt, synthetic construct
  source 1..23: mol_type = other RNA
  modified_base 1: mod_base = OTHER; note = 2'-O-Methyl ribonucleotide
  modified_base 2: mod_base = OTHER; note = 2'-fluoro ribonucleotide
  modified_base 3..6: mod_base = OTHER; note = 2'-O-Methyl ribonucleotide
  modified_base 7: mod_base = OTHER; note = 2'-fluoro ribonucleotide
  modified_base 8..11: mod_base = OTHER; note = 2'-O-Methyl ribonucleotide
  modified_base 12: mod_base = OTHER; note = 2'-fluoro ribonucleotide
  modified_base 13: mod_base = OTHER; note = 2'-O-Methyl ribonucleotide
  modified_base 14: mod_base = OTHER; note = 2'-fluoro ribonucleotide
  modified_base 15: mod_base = OTHER; note = 2'-O-Methyl ribonucleotide
  modified_base 16: mod_base = OTHER; note = 2'-fluoro ribonucleotide
  modified_base 17..23: mod_base = OTHER; note = 2'-O-Methyl ribonucleotide
  modified_base 1..3: mod_base = OTHER; note = phosphorothioate linkage
  modified_base 21..23: mod_base = OTHER; note = phosphorothioate linkage
tttggtattctggccctaaaaaa

SEQ ID NO: 395 - RNA, 23 nt, synthetic construct
  source 1..23: mol_type = other RNA
  modified_base 1: mod_base = OTHER; note = 2'-O-Methyl ribonucleotide
  modified_base 2: mod_base = OTHER; note = 2'-fluoro ribonucleotide
  modified_base 3..6: mod_base = OTHER; note = 2'-O-Methyl ribonucleotide
  modified_base 7: mod_base = OTHER; note = 2'-fluoro ribonucleotide
  modified_base 8..11: mod_base = OTHER; note = 2'-O-Methyl ribonucleotide
  modified_base 12: mod_base = OTHER; note = 2'-fluoro ribonucleotide
  modified_base 13: mod_base = OTHER; note = 2'-O-Methyl ribonucleotide
  modified_base 14: mod_base = OTHER; note = 2'-fluoro ribonucleotide
  modified_base 15: mod_base = OTHER; note = 2'-O-Methyl ribonucleotide
  modified_base 16: mod_base = OTHER; note = 2'-fluoro ribonucleotide
  modified_base 17..23: mod_base = OTHER; note = 2'-O-Methyl ribonucleotide
  modified_base 1..3: mod_base = OTHER; note = phosphorothioate linkage
  modified_base 21..23: mod_base = OTHER; note = phosphorothioate linkage
ttttggtattctggccctaaaaa

SEQ ID NO: 396 - RNA, 23 nt, synthetic construct
  source 1..23: mol_type = other RNA
  modified_base 1: mod_base = OTHER; note = 2'-O-Methyl ribonucleotide
  modified_base 2: mod_base = OTHER; note = 2'-fluoro ribonucleotide
  modified_base 3..6: mod_base = OTHER; note = 2'-O-Methyl ribonucleotide
  modified_base 7: mod_base = OTHER; note = 2'-fluoro ribonucleotide
  modified_base 8..11: mod_base = OTHER; note = 2'-O-Methyl ribonucleotide
  modified_base 12: mod_base = OTHER; note = 2'-fluoro ribonucleotide
  modified_base 13: mod_base = OTHER; note = 2'-O-Methyl ribonucleotide
  modified_base 14: mod_base = OTHER; note = 2'-fluoro ribonucleotide
  modified_base 15: mod_base = OTHER; note = 2'-O-Methyl ribonucleotide
  modified_base 16: mod_base = OTHER; note = 2'-fluoro ribonucleotide
  modified_base 17..23: mod_base = OTHER; note = 2'-O-Methyl ribonucleotide
  modified_base 1..3: mod_base = OTHER; note = phosphorothioate linkage
  modified_base 21..23: mod_base = OTHER; note = phosphorothioate linkage
tgaagcaactcatatattaaata

SEQ ID NO: 397-400 - skipped (4 entries)

SEQ ID NO: 401 - RNA, 21 nt, synthetic construct
  source 1..21: mol_type = other RNA
aaaaatgttcacaattaagca

SEQ ID NO: 402 - RNA, 21 nt, synthetic construct
  source 1..21: mol_type = other RNA
aatgttcacaattaagctcca

SEQ ID NO: 403 - RNA, 21 nt, synthetic construct
  source 1..21: mol_type = other RNA
tgttcacaattaagctcctta

SEQ ID NO: 404 - RNA, 21 nt, synthetic construct
  source 1..21: mol_type = other RNA
tcacaattaagctccttctta

SEQ ID NO: 405 - RNA, 21 nt, synthetic construct
  source 1..21: mol_type = other RNA
aattaagctccttctttttaa

SEQ ID NO: 406 - RNA, 21 nt, synthetic construct
  source 1..21: mol_type = other RNA
attaagctccttctttttata

SEQ ID NO: 407 - RNA, 21 nt, synthetic construct
  source 1..21: mol_type = other RNA
ttttattgttcctctagttaa

SEQ ID NO: 408 - RNA, 21 nt, synthetic construct
  source 1..21: mol_type = other RNA
tttattgttcctctagttata

SEQ ID NO: 409 - RNA, 21 nt, synthetic construct
  source 1..21: mol_type = other RNA
ttgttcctctagttatttcca

SEQ ID NO: 410 - RNA, 21 nt, synthetic construct
  source 1..21: mol_type = other RNA
atcaagatttgctatgttaga

SEQ ID NO: 411 - RNA, 21 nt, synthetic construct
  source 1..21: mol_type = other RNA
caagatttgctatgttagaca

SEQ ID NO: 412 - RNA, 21 nt, synthetic construct
  source 1..21: mol_type = other RNA
aagatttgctatgttagacga

SEQ ID NO: 413 - RNA, 21 nt, synthetic construct
  source 1..21: mol_type = other RNA
agatttgctatgttagacgaa

SEQ ID NO: 414 - RNA, 21 nt, synthetic construct
  source 1..21: mol_type = other RNA
gatttgctatgttagacgata

SEQ ID NO: 415 - RNA, 21 nt, synthetic construct
  source 1..21: mol_type = other RNA
atttgctatgttagacgatga

SEQ ID NO: 416 - RNA, 21 nt, synthetic construct
  source 1..21: mol_type = other RNA
tttgctatgttagacgatgta

SEQ ID NO: 417 - RNA, 21 nt, synthetic construct
  source 1..21: mol_type = other RNA
ttgctatgttagacgatgtaa

SEQ ID NO: 418 - RNA, 21 nt, synthetic construct
  source 1..21: mol_type = other RNA
gctatgttagacgatgtaaaa

SEQ ID NO: 419 - RNA, 21 nt, synthetic construct
  source 1..21: mol_type = other RNA
ctatgttagacgatgtaaaaa

SEQ ID NO: 420 - RNA, 21 nt, synthetic construct
  source 1..21: mol_type = other RNA
tatgttagacgatgtaaaaaa

SEQ ID NO: 421 - RNA, 21 nt, synthetic construct
  source 1..21: mol_type = other RNA
tgttagacgatgtaaaaatta

SEQ ID NO: 422 - RNA, 21 nt, synthetic construct
  source 1..21: mol_type = other RNA
ttagacgatgtaaaaatttta

SEQ ID NO: 423 - RNA, 21 nt, synthetic construct
  source 1..21: mol_type = other RNA
aaattttagccaatggcctca

SEQ ID NO: 424 - RNA, 21 nt, synthetic construct
  source 1..21: mol_type = other RNA
aattttagccaatggcctcca

SEQ ID NO: 425 - RNA, 21 nt, synthetic construct
  source 1..21: mol_type = other RNA
ttagccaatggcctccttcaa

SEQ ID NO: 426 - RNA, 21 nt, synthetic construct
  source 1..21: mol_type = other RNA
ccaatggcctccttcagttga

SEQ ID NO: 427 - RNA, 21 nt, synthetic construct
  source 1..21: mol_type = other RNA
caatggcctccttcagttgga

SEQ ID NO: 428 - RNA, 21 nt, synthetic construct
  source 1..21: mol_type = other RNA
aatggcctccttcagttggga

SEQ ID NO: 429 - RNA, 21 nt, synthetic construct
  source 1..21: mol_type = other RNA
ctccttcagttgggacatgga

SEQ ID NO: 430 - RNA, 21 nt, synthetic construct
  source 1..21: mol_type = other RNA
cttcagttgggacatggtcta

SEQ ID NO: 431 - RNA, 21 nt, synthetic construct
  source 1..21: mol_type = other RNA
agttgggacatggtcttaaaa

SEQ ID NO: 432 - RNA, 21 nt, synthetic construct
  source 1..21: mol_type = other RNA
ttgggacatggtcttaaagaa

SEQ ID NO: 433 - RNA, 21 nt, synthetic construct
  source 1..21: mol_type = other RNA
gggacatggtcttaaagacta

SEQ ID NO: 434 - RNA, 21 nt, synthetic construct
  source 1..21: mol_type = other RNA
ggacatggtcttaaagactta

SEQ ID NO: 435 - RNA, 21 nt, synthetic construct
  source 1..21: mol_type = other RNA
gacatggtcttaaagacttta

SEQ ID NO: 436 - RNA, 21 nt, synthetic construct
  source 1..21: mol_type = other RNA
acatggtcttaaagactttga

SEQ ID NO: 437 - RNA, 21 nt, synthetic construct
  source 1..21: mol_type = other RNA
catggtcttaaagactttgta

SEQ ID NO: 438 - RNA, 21 nt, synthetic construct
  source 1..21: mol_type = other RNA
ttaaagactttgtccataaga

SEQ ID NO: 439 - RNA, 21 nt, synthetic construct
  source 1..21: mol_type = other RNA
acgaagggccaaattaatgaa

SEQ ID NO: 440 - RNA, 21 nt, synthetic construct
  source 1..21: mol_type = other RNA
actcaacatatttgatcagta

SEQ ID NO: 441 - RNA, 21 nt, synthetic construct
  source 1..21: mol_type = other RNA
acatatttgatcagtctttta

SEQ ID NO: 442 - RNA, 21 nt, synthetic construct
  source 1..21: mol_type = other RNA
gatcagtctttttatgatcta

SEQ ID NO: 443 - RNA, 21 nt, synthetic construct
  source 1..21: mol_type = other RNA
atcagtctttttatgatctaa

SEQ ID NO: 444 - RNA, 21 nt, synthetic construct
  source 1..21: mol_type = other RNA
acatataaactacaagtcaaa

SEQ ID NO: 445 - RNA, 21 nt, synthetic construct
  source 1..21: mol_type = other RNA
tcacttgaactcaactcaaaa

SEQ ID NO: 446 - RNA, 21 nt, synthetic construct
  source 1..21: mol_type = other RNA
caaaacttgaaagcctcctaa

SEQ ID NO: 447 - RNA, 21 nt, synthetic construct
  source 1..21: mol_type = other RNA
aaatatttagaagagcaacta

SEQ ID NO: 448 - RNA, 21 nt, synthetic construct
  source 1..21: mol_type = other RNA
agaagagcaactaactaacta

SEQ ID NO: 449 - RNA, 21 nt, synthetic construct
  source 1..21: mol_type = other RNA
aagagcaactaactaacttaa

SEQ ID NO: 450 - RNA, 21 nt, synthetic construct
  source 1..21: mol_type = other RNA
agagcaactaactaacttaaa

SEQ ID NO: 451 - RNA, 21 nt, synthetic construct
  source 1..21: mol_type = other RNA
gagcaactaactaacttaata

SEQ ID NO: 452 - RNA, 21 nt, synthetic construct
  source 1..21: mol_type = other RNA
taacttaattcaaaatcaaca

SEQ ID NO: 453 - RNA, 21 nt, synthetic construct
  source 1..21: mol_type = other RNA
acccagaagtaacttcactta

SEQ ID NO: 454 - RNA, 21 nt, synthetic construct
  source 1..21: mol_type = other RNA
cccagaagtaacttcacttaa

SEQ ID NO: 455 - RNA, 21 nt, synthetic construct
  source 1..21: mol_type = other RNA
aaaaacaagataatagcatca

SEQ ID NO: 456 - RNA, 21 nt, synthetic construct
  source 1..21: mol_type = other RNA
aaacaagataatagcatcaaa

SEQ ID NO: 457 - RNA, 21 nt, synthetic construct
  source 1..21: mol_type = other RNA
agataatagcatcaaagacca

SEQ ID NO: 458 - RNA, 21 nt, synthetic construct
  source 1..21: mol_type = other RNA
ataatagcatcaaagacctta

SEQ ID NO: 459 - RNA, 21 nt, synthetic construct
  source 1..21: mol_type = other RNA
caattaaaccaacagcataga

SEQ ID NO: 460 - RNA, 21 nt, synthetic construct
  source 1..21: mol_type = other RNA
aaccaacagcatagtcaaata

SEQ ID NO: 461 - RNA, 21 nt, synthetic construct
  source 1..21: mol_type = other RNA
agccaagagcaccaagaacta

SEQ ID NO: 462 - RNA, 21 nt, synthetic construct
  source 1..21: mol_type = other RNA
tcagacccagcaactctcaaa

SEQ ID NO: 463 - RNA, 21 nt, synthetic construct
  source 1..21: mol_type = other RNA
cagacccagcaactctcaaga

SEQ ID NO: 464 - RNA, 21 nt, synthetic construct
  source 1..21: mol_type = other RNA
agacccagcaactctcaagta

SEQ ID NO: 465 - RNA, 21 nt, synthetic construct
  source 1..21: mol_type = other RNA
agcaactctcaagtttttcaa

SEQ ID NO: 466 - RNA, 21 nt, synthetic construct
  source 1..21: mol_type = other RNA
ttatatcaggtagtccatgga

SEQ ID NO: 467 - RNA, 21 nt, synthetic construct
  source 1..21: mol_type = other RNA
tatcaggtagtccatggacaa

SEQ ID NO: 468 - RNA, 21 nt, synthetic construct
  source 1..21: mol_type = other RNA
atcaggtagtccatggacata

SEQ ID NO: 469 - RNA, 21 nt, synthetic construct
  source 1..21: mol_type = other RNA
tcaggtagtccatggacatta

SEQ ID NO: 470 - RNA, 21 nt, synthetic construct
  source 1..21: mol_type = other RNA
agtccatggacattaattcaa

SEQ ID NO: 471 - RNA, 21 nt, synthetic construct
  source 1..21: mol_type = other RNA
gtccatggacattaattcaaa

SEQ ID NO: 472 - RNA, 21 nt, synthetic construct
  source 1..21: mol_type = other RNA
tccatggacattaattcaaca

SEQ ID NO: 473 - RNA, 21 nt, synthetic construct
  source 1..21: mol_type = other RNA
ggacattaattcaacatcgaa

SEQ ID NO: 474 - RNA, 21 nt, synthetic construct
  source 1..21: mol_type = other RNA
acattaattcaacatcgaata

SEQ ID NO: 475 - RNA, 21 nt, synthetic construct
  source 1..21: mol_type = other RNA
cattaattcaacatcgaataa

SEQ ID NO: 476 - RNA, 21 nt, synthetic construct
  source 1..21: mol_type = other RNA
ttaattcaacatcgaatagaa

SEQ ID NO: 477 - RNA, 21 nt, synthetic construct
  source 1..21: mol_type = other RNA
taattcaacatcgaatagata

SEQ ID NO: 478 - RNA, 21 nt, synthetic construct
  source 1..21: mol_type = other RNA
aattcaacatcgaatagatga

SEQ ID NO: 479 - RNA, 21 nt, synthetic construct
  source 1..21: mol_type = other RNA
tcaacatcgaatagatggata

SEQ ID NO: 480 - RNA, 21 nt, synthetic construct
  source 1..21: mol_type = other RNA
caacatcgaatagatggatca

SEQ ID NO: 481 - RNA, 21 nt, synthetic construct
  source 1..21: mol_type = other RNA
aacatcgaatagatggatcaa

SEQ ID NO: 482 - RNA, 21 nt, synthetic construct
  source 1..21: mol_type = other RNA
acatcgaatagatggatcaca

SEQ ID NO: 483 - RNA, 21 nt, synthetic construct
  source 1..21: mol_type = other RNA
tcgaatagatggatcacaaaa

SEQ ID NO: 484 - RNA, 21 nt, synthetic construct
  source 1..21: mol_type = other RNA
atagatggatcacaaaactta

SEQ ID NO: 485 - RNA, 21 nt, synthetic construct
  source 1..21: mol_type = other RNA
gatggatcacaaaacttcaaa

SEQ ID NO: 486 - RNA, 21 nt, synthetic construct
  source 1..21: mol_type = other RNA
acaaaacttcaatgaaacgta

SEQ ID NO: 487 - RNA, 21 nt, synthetic construct
  source 1..21: mol_type = other RNA
aaaacttcaatgaaacgtgga

SEQ ID NO: 488 - RNA, 21 nt, synthetic construct
  source 1..21: mol_type = other RNA
aaacttcaatgaaacgtggga

SEQ ID NO: 489 - RNA, 21 nt, synthetic construct
  source 1..21: mol_type = other RNA
cttcaatgaaacgtgggagaa

SEQ ID NO: 490 - RNA, 21 nt, synthetic construct
  source 1..21: mol_type = other RNA
ttcaatgaaacgtgggagaaa

SEQ ID NO: 491 - RNA, 21 nt, synthetic construct
  source 1..21: mol_type = other RNA
tcaatgaaacgtgggagaaca

SEQ ID NO: 492 - RNA, 21 nt, synthetic construct
  source 1..21: mol_type = other RNA
aatgaaacgtgggagaactaa

SEQ ID NO: 493 - RNA, 21 nt, synthetic construct
  source 1..21: mol_type = other RNA
atgaaacgtgggagaactaca

SEQ ID NO: 494 - RNA, 21 nt, synthetic construct
  source 1..21: mol_type = other RNA
gaaacgtgggagaactacaaa

SEQ ID NO: 495 - RNA, 21 nt, synthetic construct
  source 1..21: mol_type = other RNA
aaacgtgggagaactacaaaa

SEQ ID NO: 496 - RNA, 21 nt, synthetic construct
  source 1..21: mol_type = other RNA
tgggagaactacaaatatgga

SEQ ID NO: 497 - RNA, 21 nt, synthetic construct
  source 1..21: mol_type = other RNA
tgggaggcttgatggagaata

SEQ ID NO: 498 - RNA, 21 nt, synthetic construct
  source 1..21: mol_type = other RNA
gggaggcttgatggagaatta

SEQ ID NO: 499 - RNA, 21 nt, synthetic construct
  source 1..21: mol_type = other RNA
gggcctagagaagatatacta

SEQ ID NO: 500 - RNA, 21 nt, synthetic construct
  source 1..21: mol_type = other RNA
gcctagagaagatatactcca

SEQ ID NO: 501 - RNA, 21 nt, synthetic construct
  source 1..21: mol_type = other RNA
agagaagatatactccataga

SEQ ID NO: 502 - RNA, 21 nt, synthetic construct
  source 1..21: mol_type = other RNA
gagaagatatactccatagta

SEQ ID NO: 503 - RNA, 21 nt, synthetic construct
  source 1..21: mol_type = other RNA
agaagatatactccatagtga

SEQ ID NO: 504 - RNA, 21 nt, synthetic construct
  source 1..21: mol_type = other RNA
gaagatatactccatagtgaa

SEQ ID NO: 505 - RNA, 21 nt, synthetic construct
  source 1..21: mol_type = other RNA
aagatatactccatagtgaaa

SEQ ID NO: 506 - RNA, 21 nt, synthetic construct
  source 1..21: mol_type = other RNA
tatactccatagtgaagcaaa

SEQ ID NO: 507 - RNA, 21 nt, synthetic construct
  source 1..21: mol_type = other RNA
atactccatagtgaagcaata

SEQ ID NO: 508 - RNA, 21 nt, synthetic construct
  source 1..21: mol_type = other RNA
ccatagtgaagcaatctaata

SEQ ID NO: 509 - RNA, 21 nt, synthetic construct
  source 1..21: mol_type = other RNA
atagtgaagcaatctaattaa

SEQ ID NO: 510 - RNA, 21 nt, synthetic construct
  source 1..21: mol_type = other RNA
ttttacttgggaaatcacgaa

SEQ ID NO: 511 - RNA, 21 nt, synthetic construct
  source 1..21: mol_type = other RNA
ttgggaaatcacgaaaccaaa

SEQ ID NO: 512 - RNA, 21 nt, synthetic construct
  source 1..21: mol_type = other RNA
gggaaatcacgaaaccaacta

SEQ ID NO: 513 - RNA, 21 nt, synthetic construct
  source 1..21: mol_type = other RNA
ggaaatcacgaaaccaactaa

SEQ ID NO: 514 - RNA, 21 nt, synthetic construct
  source 1..21: mol_type = other RNA
aaatcacgaaaccaactataa

SEQ ID NO: 515 - RNA, 21 nt, synthetic construct
  source 1..21: mol_type = other RNA
aatcacgaaaccaactataca

SEQ ID NO: 516 - RNA, 21 nt, synthetic construct
  source 1..21: mol_type = other RNA
atcacgaaaccaactatacga

SEQ ID NO: 517 - RNA, 21 nt, synthetic construct
  source 1..21: mol_type = other RNA
tcacgaaaccaactatacgca

SEQ ID NO: 518 - RNA, 21 nt, synthetic construct
  source 1..21: mol_type = other RNA
cacgaaaccaactatacgcta

SEQ ID NO: 519 - RNA, 21 nt, synthetic construct
  source 1..21: mol_type = other RNA
gaaaccaactatacgctacaa

SEQ ID NO: 520 - RNA, 21 nt, synthetic construct
  source 1..21: mol_type = other RNA
tgcgattactggcaatgtcca

SEQ ID NO: 521 - RNA, 21 nt, synthetic construct
  source 1..21: mol_type = other RNA
gcgattactggcaatgtccca

SEQ ID NO: 522 - RNA, 21 nt, synthetic construct
  source 1..21: mol_type = other RNA
cgattactggcaatgtcccca

SEQ ID NO: 523 - RNA, 21 nt, synthetic construct
  source 1..21: mol_type = other RNA
gattactggcaatgtccccaa

SEQ ID NO: 524 - RNA, 21 nt, synthetic construct
  source 1..21: mol_type = other RNA
ttactggcaatgtccccaata

SEQ ID NO: 525 - RNA, 21 nt, synthetic construct
  source 1..21: mol_type = other RNA
gcaatgtccccaatgcaatca

SEQ ID NO: 526 - RNA, 21 nt, synthetic construct
  source 1..21: mol_type = other RNA
caatgtccccaatgcaatcca

SEQ ID NO: 527 - RNA, 21 nt, synthetic construct
  source 1..21: mol_type = other RNA
atgtccccaatgcaatcccga

SEQ ID NO: 528 - RNA, 21 nt, synthetic construct
  source 1..21: mol_type = other RNA
ccccaatgcaatcccggaaaa

SEQ ID NO: 529 - RNA, 21 nt, synthetic construct
  source 1..21: mol_type = other RNA
caatgcaatcccggaaaacaa

SEQ ID NO: 530 - RNA, 21 nt, synthetic construct
  source 1..21: mol_type = other RNA
aatgcaatcccggaaaacaaa

SEQ ID NO: 531 - RNA, 21 nt, synthetic construct
  source 1..21: mol_type = other RNA
atgcaatcccggaaaacaaaa

SEQ ID NO: 532 - RNA, 21 nt, synthetic construct
  source 1..21: mol_type = other RNA
tgcaatcccggaaaacaaaga

SEQ ID NO: 533 - RNA, 21 nt, synthetic construct
  source 1..21: mol_type = other RNA
gcaatcccggaaaacaaagaa

SEQ ID NO: 534 - RNA, 21 nt, synthetic construct
  source 1..21: mol_type = other RNA
caatcccggaaaacaaagata

SEQ ID NO: 535 - RNA, 21 nt, synthetic construct
  source 1..21: mol_type = other RNA
gatttggtgttttctacttga

SEQ ID NO: 536 - RNA, 21 nt, synthetic construct
  source 1..21: mol_type = other RNA
atttggtgttttctacttgga

SEQ ID NO: 537 - RNA, 21 nt, synthetic construct
  source 1..21: mol_type = other RNA
tttggtgttttctacttggga

SEQ ID NO: 538 - RNA, 21 nt, synthetic construct
  source 1..21: mol_type = other RNA
tgttttctacttgggatcaca

SEQ ID NO: 539 - RNA, 21 nt, synthetic construct
  source 1..21: mol_type = other RNA
tttctacttgggatcacaaaa

SEQ ID NO: 540 - RNA, 21 nt, synthetic construct
  source 1..21: mol_type = other RNA
ttctacttgggatcacaaaga

SEQ ID NO: 541 - RNA, 21 nt, synthetic construct
  source 1..21: mol_type = other RNA
ctacttgggatcacaaagcaa

SEQ ID NO: 542 - RNA, 21 nt, synthetic construct
  source 1..21: mol_type = other RNA
tacttgggatcacaaagcaaa

SEQ ID NO: 543 - RNA, 21 nt, synthetic construct
  source 1..21: mol_type = other RNA
aatggtaaatataacaaacca

SEQ ID NO: 544 - RNA, 21 nt, synthetic construct
  source 1..21: mol_type = other RNA
gaagtctcaaaatggaaggta

SEQ ID NO: 545 - RNA, 21 nt, synthetic construct
  source 1..21: mol_type = other RNA
aaaatggaaggttatactcta

SEQ ID NO: 546 - RNA, 21 nt, synthetic construct
  source 1..21: mol_type = other RNA
aaatggaaggttatactctaa

SEQ ID NO: 547 - RNA, 21 nt, synthetic construct
  source 1..21: mol_type = other RNA
aatggaaggttatactctata

SEQ ID NO: 548 - RNA, 21 nt, synthetic construct
  source 1..21: mol_type = other RNA
gaaggttatactctataaaaa

SEQ ID NO: 549 - RNA, 21 nt, synthetic construct
  source 1..21: mol_type = other RNA
aggttatactctataaaatca

SEQ ID NO: 550 - RNA, 21 nt, synthetic construct
  source 1..21: mol_type = other RNA
aatcaaccaaaatgttgatca

SEQ ID NO: 551 - RNA, 21 nt, synthetic construct
  source 1..21: mol_type = other RNA
atcaaccaaaatgttgatcca

SEQ ID NO: 552 - RNA, 21 nt, synthetic construct
  source 1..21: mol_type = other RNA
tcaaccaaaatgttgatccaa

SEQ ID NO: 553 - RNA, 21 nt, synthetic construct
  source 1..21: mol_type = other RNA
caaccaaaatgttgatccata

SEQ ID NO: 554 - RNA, 21 nt, synthetic construct
  source 1..21: mol_type = other RNA
accaaaatgttgatccatcca

SEQ ID NO: 555 - RNA, 21 nt, synthetic construct
  source 1..21: mol_type = other RNA
ccaaaatgttgatccatccaa

SEQ ID NO: 556 - RNA, 21 nt, synthetic construct
  source 1..21: mol_type = other RNA
aacctcattccaagttaatga

SEQ ID NO: 557 - RNA, 21 nt, synthetic construct
  source 1..21: mol_type = other RNA
ataatctggtattaaatccta

SEQ ID NO: 558 - RNA, 21 nt, synthetic construct
  source 1..21: mol_type = other RNA
aatctggtattaaatccttaa

SEQ ID NO: 559 - RNA, 21 nt, synthetic construct
  source 1..21: mol_type = other RNA
tctggtattaaatccttaaga

SEQ ID NO: 560 - RNA, 21 nt, synthetic construct
  source 1..21: mol_type = other RNA
atttaagattaaacatacaaa

SEQ ID NO: 561 - RNA, 21 nt, synthetic construct
  source 1..21: mol_type = other RNA
taagattaaacatacaatcaa

SEQ ID NO: 562 - RNA, 21 nt, synthetic construct
  source 1..21: mol_type = other RNA
tcacataaccttaaagaataa

SEQ ID NO: 563 - RNA, 21 nt, synthetic construct
  source 1..21: mol_type = other RNA
tgtgatgtgggaatcaattta

SEQ ID NO: 564 - RNA, 21 nt, synthetic construct
  source 1..21: mol_type = other RNA
gggaatcaattttagatggta

SEQ ID NO: 565 - RNA, 21 nt, synthetic construct
  source 1..21: mol_type = other RNA
aggcatcatatgagctaataa

SEQ ID NO: 566 - RNA, 21 nt, synthetic construct
  source 1..21: mol_type = other RNA
atcatatgagctaatatcaca

SEQ ID NO: 567 - RNA, 21 nt, synthetic construct
  source 1..21: mol_type = other RNA
tcatatgagctaatatcacaa

SEQ ID NO: 568 - RNA, 21 nt, synthetic construct
  source 1..21: mol_type = other RNA
gttaaaactctaaacttgaca

SEQ ID NO: 569 - RNA, 21 nt, synthetic construct
  source 1..21: mol_type = other RNA
taaaactctaaacttgactaa

SEQ ID NO: 570 - RNA, 21 nt, synthetic construct
  source 1..21: mol_type = other RNA
actctaaacttgactaaataa

SEQ ID NO: 571 - RNA, 21 nt, synthetic construct
  source 1..21: mol_type = other RNA
atcgtcagcacagagtatgta

SEQ ID NO: 572 - RNA, 21 nt, synthetic construct
  source 1..21: mol_type = other RNA
gactactaagtcacattgaca

SEQ ID NO: 573 - RNA, 21 nt, synthetic construct
  source 1..21: mol_type = other RNA
acatgaggtatcactatacca

SEQ ID NO: 574 - RNA, 21 nt, synthetic construct
  source 1..21: mol_type = other RNA
tggcatcgagttaaagtttaa

SEQ ID NO: 575 - RNA, 21 nt, synthetic construct
  source 1..21: mol_type = other RNA
ggcatcgagttaaagtttata

SEQ ID NO: 576 - RNA, 21 nt, synthetic construct
  source 1..21: mol_type = other RNA
taaagtttatatttcccctaa

SEQ ID NO: 577 - RNA, 21 nt, synthetic construct
  source 1..21: mol_type = other RNA
ttaaacccatttgttaaagga

SEQ ID NO: 578 - RNA, 21 nt, synthetic construct
  source 1..21: mol_type = other RNA
atttgttaaaggatatagtga

SEQ ID NO: 579 - RNA, 21 nt, synthetic construct
  source 1..21: mol_type = other RNA
tttgttaaaggatatagtgca

SEQ ID NO: 580 - RNA, 21 nt, synthetic construct
  source 1..21: mol_type = other RNA
tgttaaaggatatagtgccca

SEQ ID NO: 581 - RNA, 21 nt, synthetic construct
  source 1..21: mol_type = other RNA
gttaaaggatatagtgcccaa

SEQ ID NO: 582 - RNA, 21 nt, synthetic construct
  source 1..21: mol_type = other RNA
aaggatatagtgcccaagtta

SEQ ID NO: 583 - RNA, 21 nt, synthetic construct
  source 1..21: mol_type = other RNA
aggatatagtgcccaagttaa

SEQ ID NO: 584 - RNA, 21 nt, synthetic construct
  source 1..21: mol_type = other RNA
ggatatagtgcccaagttata

SEQ ID NO: 585 - RNA, 21 nt, synthetic construct
  source 1..21: mol_type = other RNA
gatatagtgcccaagttataa

SEQ ID NO: 586 - RNA, 21 nt, synthetic construct
  source 1..21: mol_type = other RNA
atggtgacctacctttgtcaa

SEQ ID NO: 587 - RNA, 21 nt, synthetic construct
  source 1..21: mol_type = other RNA
tggtgacctacctttgtcaaa

SEQ ID NO: 588 - RNA, 21 nt, synthetic construct
  source 1..21: mol_type = other RNA
ggtgacctacctttgtcaata

SEQ ID NO: 589 - RNA, 21 nt, synthetic construct
  source 1..21: mol_type = other RNA
aattatccaatatacatgtca

SEQ ID NO: 590 - RNA, 21 nt, synthetic construct
  source 1..21: mol_type = other RNA
attttcaggaccacagactaa

SEQ ID NO: 591 - RNA, 21 nt, synthetic construct
  source 1..21: mol_type = other RNA
ttcaggaccacagactaagca

SEQ ID NO: 592 - RNA, 21 nt, synthetic construct
  source 1..21: mol_type = other RNA
aggaccacagactaagctgta

SEQ ID NO: 593 - RNA, 21 nt, synthetic construct
  source 1..21: mol_type = other RNA
tttttttagggccagaataca

SEQ ID NO: 594 - RNA, 21 nt, synthetic construct
  source 1..21: mol_type = other RNA
ttttagggccagaataccaaa

SEQ ID NO: 595 - RNA, 21 nt, synthetic construct
  source 1..21: mol_type = other RNA
tttagggccagaataccaaaa

SEQ ID NO: 596 - RNA, 21 nt, synthetic construct
  source 1..21: mol_type = other RNA
tttaatatatgagttgcttca

SEQ ID NO: 597-600 - skipped (4 entries)

SEQ ID NO: 601 - RNA, 21 nt, synthetic construct
  source 1..21: mol_type = other RNA
  modified_base 1..6: mod_base = OTHER; note = 2'-O-Methyl ribonucleotide
  modified_base 7: mod_base = OTHER; note = 2'-fluoro ribonucleotide
  modified_base 8: mod_base = OTHER; note = 2'-O-Methyl ribonucleotide
  modified_base 9: mod_base = OTHER; note = 2'-fluoro ribonucleotide
  modified_base 10: mod_base = OTHER; note = 2'-O-Methyl ribonucleotide
  modified_base 11: mod_base = OTHER; note = 2'-fluoro ribonucleotide
  modified_base 12..21: mod_base = OTHER; note = 2'-O-Methyl ribonucleotide
  modified_base 1..3: mod_base = OTHER; note = phosphorothioate linkage
aaaaatgttcacaattaagca

SEQ ID NO: 602 - RNA, 21 nt, synthetic construct
  source 1..21: mol_type = other RNA
  modified_base 1..6: mod_base = OTHER; note = 2'-O-Methyl ribonucleotide
  modified_base 7: mod_base = OTHER; note = 2'-fluoro ribonucleotide
  modified_base 8: mod_base = OTHER; note = 2'-O-Methyl ribonucleotide
  modified_base 9: mod_base = OTHER; note = 2'-fluoro ribonucleotide
  modified_base 10: mod_base = OTHER; note = 2'-O-Methyl ribonucleotide
  modified_base 11: mod_base = OTHER; note = 2'-fluoro ribonucleotide
  modified_base 12..21: mod_base = OTHER; note = 2'-O-Methyl ribonucleotide
  modified_base 1..3: mod_base = OTHER; note = phosphorothioate linkage
aatgttcacaattaagctcca

SEQ ID NO: 603 - RNA, 21 nt, synthetic construct
  source 1..21: mol_type = other RNA
  modified_base 1..6: mod_base = OTHER; note = 2'-O-Methyl ribonucleotide
  modified_base 7: mod_base = OTHER; note = 2'-fluoro ribonucleotide
  modified_base 8: mod_base = OTHER; note = 2'-O-Methyl ribonucleotide
  modified_base 9: mod_base = OTHER; note = 2'-fluoro ribonucleotide
  modified_base 10: mod_base = OTHER; note = 2'-O-Methyl ribonucleotide
  modified_base 11: mod_base = OTHER; note = 2'-fluoro ribonucleotide
  modified_base 12..21: mod_base = OTHER; note = 2'-O-Methyl ribonucleotide
  modified_base 1..3: mod_base = OTHER; note = phosphorothioate linkage
tgttcacaattaagctcctta

SEQ ID NO: 604 - RNA, 21 nt, synthetic construct
  source 1..21: mol_type = other RNA
  modified_base 1..6: mod_base = OTHER; note = 2'-O-Methyl ribonucleotide
  modified_base 7: mod_base = OTHER; note = 2'-fluoro ribonucleotide
  modified_base 8: mod_base = OTHER; note = 2'-O-Methyl ribonucleotide
  modified_base 9: mod_base = OTHER; note = 2'-fluoro ribonucleotide
  modified_base 10: mod_base = OTHER; note = 2'-O-Methyl ribonucleotide
  modified_base 11: mod_base = OTHER; note = 2'-fluoro ribonucleotide
  modified_base 12..21: mod_base = OTHER; note = 2'-O-Methyl ribonucleotide
  modified_base 1..3: mod_base = OTHER; note = phosphorothioate linkage
tcacaattaagctccttctta

SEQ ID NO: 605 - RNA, 21 nt, synthetic construct
  source 1..21: mol_type = other RNA
  modified_base 1..6: mod_base = OTHER; note = 2'-O-Methyl ribonucleotide
  modified_base 7: mod_base = OTHER; note = 2'-fluoro ribonucleotide
  modified_base 8: mod_base = OTHER; note = 2'-O-Methyl ribonucleotide
  modified_base 9: mod_base = OTHER; note = 2'-fluoro ribonucleotide
  modified_base 10: mod_base = OTHER; note = 2'-O-Methyl ribonucleotide
  modified_base 11: mod_base = OTHER; note = 2'-fluoro ribonucleotide
  modified_base 12..21: mod_base = OTHER; note = 2'-O-Methyl ribonucleotide
  modified_base 1..3: mod_base = OTHER; note = phosphorothioate linkage
aattaagctccttctttttaa

SEQ ID NO: 606 - RNA, 21 nt, synthetic construct
  source 1..21: mol_type = other RNA
  modified_base 1..6: mod_base = OTHER; note = 2'-O-Methyl ribonucleotide
  modified_base 7: mod_base = OTHER; note = 2'-fluoro ribonucleotide
  modified_base 8: mod_base = OTHER; note = 2'-O-Methyl ribonucleotide
  modified_base 9: mod_base = OTHER; note = 2'-fluoro ribonucleotide
  modified_base 10: mod_base = OTHER; note = 2'-O-Methyl ribonucleotide
  modified_base 11: mod_base = OTHER; note = 2'-fluoro ribonucleotide
  modified_base 12..21: mod_base = OTHER; note = 2'-O-Methyl ribonucleotide
  modified_base 1..3: mod_base = OTHER; note = phosphorothioate linkage
attaagctccttctttttata

SEQ ID NO: 607 - RNA, 21 nt, synthetic construct
  source 1..21: mol_type = other RNA
  modified_base 1..6: mod_base = OTHER; note = 2'-O-Methyl ribonucleotide
  modified_base 7: mod_base = OTHER; note = 2'-fluoro ribonucleotide
  modified_base 8: mod_base = OTHER; note = 2'-O-Methyl ribonucleotide
  modified_base 9: mod_base = OTHER; note = 2'-fluoro ribonucleotide
  modified_base 10: mod_base = OTHER; note = 2'-O-Methyl ribonucleotide
  modified_base 11: mod_base = OTHER; note = 2'-fluoro ribonucleotide
  modified_base 12..21: mod_base = OTHER; note = 2'-O-Methyl ribonucleotide
  modified_base 1..3: mod_base = OTHER; note = phosphorothioate linkage
ttttattgttcctctagttaa

SEQ ID NO: 608 - RNA, 21 nt, synthetic construct
  source 1..21: mol_type = other RNA
  modified_base 1..6: mod_base = OTHER; note = 2'-O-Methyl ribonucleotide
  modified_base 7: mod_base = OTHER; note = 2'-fluoro ribonucleotide
  modified_base 8: mod_base = OTHER; note = 2'-O-Methyl ribonucleotide
  modified_base 9: mod_base = OTHER; note = 2'-fluoro ribonucleotide
  modified_base 10: mod_base = OTHER; note = 2'-O-Methyl ribonucleotide
  modified_base 11: mod_base = OTHER; note = 2'-fluoro ribonucleotide
  modified_base 12..21: mod_base = OTHER; note = 2'-O-Methyl ribonucleotide
  modified_base 1..3: mod_base = OTHER; note = phosphorothioate linkage
tttattgttcctctagttata

SEQ ID NO: 609 - RNA, 21 nt, synthetic construct
  source 1..21: mol_type = other RNA
  modified_base 1..6: mod_base = OTHER; note = 2'-O-Methyl ribonucleotide
  modified_base 7: mod_base = OTHER; note = 2'-fluoro ribonucleotide
  modified_base 8: mod_base = OTHER; note = 2'-O-Methyl ribonucleotide
  modified_base 9: mod_base = OTHER; note = 2'-fluoro ribonucleotide
  modified_base 10: mod_base = OTHER; note = 2'-O-Methyl ribonucleotide
  modified_base 11: mod_base = OTHER; note = 2'-fluoro ribonucleotide
  modified_base 12..21: mod_base = OTHER; note = 2'-O-Methyl ribonucleotide
  modified_base 1..3: mod_base = OTHER; note = phosphorothioate linkage
ttgttcctctagttatttcca

SEQ ID NO: 610 - RNA, 21 nt, synthetic construct
  source 1..21: mol_type = other RNA
  modified_base 1..6: mod_base = OTHER; note = 2'-O-Methyl ribonucleotide
  modified_base 7: mod_base = OTHER; note = 2'-fluoro ribonucleotide
  modified_base 8: mod_base = OTHER; note = 2'-O-Methyl ribonucleotide
  modified_base 9: mod_base = OTHER; note = 2'-fluoro ribonucleotide
  modified_base 10: mod_base = OTHER; note = 2'-O-Methyl ribonucleotide
  modified_base 11: mod_base = OTHER; note = 2'-fluoro ribonucleotide
  modified_base 12..21: mod_base = OTHER; note = 2'-O-Methyl ribonucleotide
  modified_base 1..3: mod_base = OTHER; note = phosphorothioate linkage
atcaagatttgctatgttaga

SEQ ID NO: 611 - RNA, 21 nt, synthetic construct
  source 1..21: mol_type = other RNA
  modified_base 1..6: mod_base = OTHER; note = 2'-O-Methyl ribonucleotide
  modified_base 7: mod_base = OTHER; note = 2'-fluoro ribonucleotide
  modified_base 8: mod_base = OTHER; note = 2'-O-Methyl ribonucleotide
  modified_base 9: mod_base = OTHER; note = 2'-fluoro ribonucleotide
  modified_base 10: mod_base = OTHER; note = 2'-O-Methyl ribonucleotide
  modified_base 11: mod_base = OTHER; note = 2'-fluoro ribonucleotide
  modified_base 12..21: mod_base = OTHER; note = 2'-O-Methyl ribonucleotide
  modified_base 1..3: mod_base = OTHER; note = phosphorothioate linkage
caagatttgctatgttagaca

SEQ ID NO: 612 - RNA, 21 nt, synthetic construct
  source 1..21: mol_type = other RNA
  modified_base 1..6: mod_base = OTHER; note = 2'-O-Methyl ribonucleotide
  modified_base 7: mod_base = OTHER; note = 2'-fluoro ribonucleotide
  modified_base 8: mod_base = OTHER; note = 2'-O-Methyl ribonucleotide
  modified_base 9: mod_base = OTHER; note = 2'-fluoro ribonucleotide
  modified_base 10: mod_base = OTHER; note = 2'-O-Methyl ribonucleotide
  modified_base 11: mod_base = OTHER; note = 2'-fluoro ribonucleotide
  modified_base 12..21: mod_base = OTHER; note = 2'-O-Methyl ribonucleotide
  modified_base 1..3: mod_base = OTHER; note = phosphorothioate linkage
aagatttgctatgttagacga

SEQ ID NO: 613 - RNA, 21 nt, synthetic construct
  source 1..21: mol_type = other RNA
  modified_base 1..6: mod_base = OTHER; note = 2'-O-Methyl ribonucleotide
  modified_base 7: mod_base = OTHER; note = 2'-fluoro ribonucleotide
  modified_base 8: mod_base = OTHER; note = 2'-O-Methyl ribonucleotide
  modified_base 9: mod_base = OTHER; note = 2'-fluoro ribonucleotide
  modified_base 10: mod_base = OTHER; note = 2'-O-Methyl ribonucleotide
  modified_base 11: mod_base = OTHER; note = 2'-fluoro ribonucleotide
  modified_base 12..21: mod_base = OTHER; note = 2'-O-Methyl ribonucleotide
  modified_base 1..3: mod_base = OTHER; note = phosphorothioate linkage
agatttgctatgttagacgaa

SEQ ID NO: 614 - RNA, 21 nt, synthetic construct
  source 1..21: mol_type = other RNA
  modified_base 1..6: mod_base = OTHER; note = 2'-O-Methyl ribonucleotide
  modified_base 7: mod_base = OTHER; note = 2'-fluoro ribonucleotide
  modified_base 8: mod_base = OTHER; note = 2'-O-Methyl ribonucleotide
  modified_base 9: mod_base = OTHER; note = 2'-fluoro ribonucleotide
  modified_base 10: mod_base = OTHER; note = 2'-O-Methyl ribonucleotide
  modified_base 11: mod_base = OTHER; note = 2'-fluoro ribonucleotide
  modified_base 12..21: mod_base = OTHER; note = 2'-O-Methyl ribonucleotide
  modified_base 1..3: mod_base = OTHER; note = phosphorothioate linkage
gatttgctatgttagacgata

SEQ ID NO: 615 - RNA, 21 nt, synthetic construct
  source 1..21: mol_type = other RNA
  modified_base 1..6: mod_base = OTHER; note = 2'-O-Methyl ribonucleotide
  modified_base 7: mod_base = OTHER; note = 2'-fluoro ribonucleotide
  modified_base 8: mod_base = OTHER; note = 2'-O-Methyl ribonucleotide
  modified_base 9: mod_base = OTHER; note = 2'-fluoro ribonucleotide
  modified_base 10: mod_base = OTHER; note = 2'-O-Methyl ribonucleotide
  modified_base 11: mod_base = OTHER; note = 2'-fluoro ribonucleotide
  modified_base 12..21: mod_base = OTHER; note = 2'-O-Methyl ribonucleotide
  modified_base 1..3: mod_base = OTHER; note = phosphorothioate linkage
atttgctatgttagacgatga

SEQ ID NO: 616 - RNA, 21 nt, synthetic construct
  source 1..21: mol_type = other RNA
  modified_base 1..6: mod_base = OTHER; note = 2'-O-Methyl ribonucleotide
  modified_base 7: mod_base = OTHER; note = 2'-fluoro ribonucleotide
  modified_base 8: mod_base = OTHER; note = 2'-O-Methyl ribonucleotide
  modified_base 9: mod_base = OTHER; note = 2'-fluoro ribonucleotide
  modified_base 10: mod_base = OTHER; note = 2'-O-Methyl ribonucleotide
  modified_base 11: mod_base = OTHER; note = 2'-fluoro ribonucleotide
  modified_base 12..21: mod_base = OTHER; note = 2'-O-Methyl ribonucleotide
  modified_base 1..3: mod_base = OTHER; note = phosphorothioate linkage
tttgctatgttagacgatgta

SEQ ID NO: 617 - RNA, 21 nt, synthetic construct
  source 1..21: mol_type = other RNA
  modified_base 1..6: mod_base = OTHER; note = 2'-O-Methyl ribonucleotide
  modified_base 7: mod_base = OTHER; note = 2'-fluoro ribonucleotide
  modified_base 8: mod_base = OTHER; note = 2'-O-Methyl ribonucleotide
  modified_base 9: mod_base = OTHER; note = 2'-fluoro ribonucleotide
  modified_base 10: mod_base = OTHER; note = 2'-O-Methyl ribonucleotide
  modified_base 11: mod_base = OTHER; note = 2'-fluoro ribonucleotide
  modified_base 12..21: mod_base = OTHER; note = 2'-O-Methyl ribonucleotide
  modified_base 1..3: mod_base = OTHER; note = phosphorothioate linkage
ttgctatgttagacgatgtaa

SEQ ID NO: 618 - RNA, 21 nt, synthetic construct
  source 1..21: mol_type = other RNA
  modified_base 1..6: mod_base = OTHER; note = 2'-O-Methyl ribonucleotide
  modified_base 7: mod_base = OTHER; note = 2'-fluoro ribonucleotide
  modified_base 8: mod_base = OTHER; note = 2'-O-Methyl ribonucleotide
  modified_base 9: mod_base = OTHER; note = 2'-fluoro ribonucleotide
  modified_base 10: mod_base = OTHER; note = 2'-O-Methyl ribonucleotide
  modified_base 11: mod_base = OTHER; note = 2'-fluoro ribonucleotide
  modified_base 12..21: mod_base = OTHER; note = 2'-O-Methyl ribonucleotide
  modified_base 1..3: mod_base = OTHER; note = phosphorothioate linkage
gctatgttagacgatgtaaaa

SEQ ID NO: 619 - RNA, 21 nt, synthetic construct
  source 1..21: mol_type = other RNA
  modified_base 1..6: mod_base = OTHER; note = 2'-O-Methyl ribonucleotide
  modified_base 7: mod_base = OTHER; note = 2'-fluoro ribonucleotide
  modified_base 8: mod_base = OTHER; note = 2'-O-Methyl ribonucleotide
  modified_base 9: mod_base = OTHER; note = 2'-fluoro ribonucleotide
  modified_base 10: mod_base = OTHER; note = 2'-O-Methyl ribonucleotide
  modified_base 11: mod_base = OTHER; note = 2'-fluoro ribonucleotide
  modified_base 12..21: mod_base = OTHER; note = 2'-O-Methyl ribonucleotide
  modified_base 1..3: mod_base = OTHER; note = phosphorothioate linkage
ctatgttagacgatgtaaaaa

SEQ ID NO: 620 - RNA, 21 nt, synthetic construct
  source 1..21: mol_type = other RNA
  modified_base 1..6: mod_base = OTHER; note = 2'-O-Methyl ribonucleotide
  modified_base 7: mod_base = OTHER; note = 2'-fluoro ribonucleotide
  modified_base 8: mod_base = OTHER; note = 2'-O-Methyl ribonucleotide
  modified_base 9: mod_base = OTHER; note = 2'-fluoro ribonucleotide
  modified_base 10: mod_base = OTHER; note = 2'-O-Methyl ribonucleotide
  modified_base 11: mod_base = OTHER; note = 2'-fluoro ribonucleotide
  modified_base 12..21: mod_base = OTHER; note = 2'-O-Methyl ribonucleotide
  modified_base 1..3: mod_base = OTHER; note = phosphorothioate linkage
tatgttagacgatgtaaaaaa

SEQ ID NO: 621 - RNA, 21 nt, synthetic construct
  source 1..21: mol_type = other RNA
  modified_base 1..6: mod_base = OTHER; note = 2'-O-Methyl ribonucleotide
  modified_base 7: mod_base = OTHER; note = 2'-fluoro ribonucleotide
  modified_base 8: mod_base = OTHER; note = 2'-O-Methyl ribonucleotide
  modified_base 9: mod_base = OTHER; note = 2'-fluoro ribonucleotide
  modified_base 10: mod_base = OTHER; note = 2'-O-Methyl ribonucleotide
  modified_base 11: mod_base = OTHER; note = 2'-fluoro ribonucleotide
  modified_base 12..21: mod_base = OTHER; note = 2'-O-Methyl ribonucleotide
  modified_base 1..3: mod_base = OTHER; note = phosphorothioate linkage
tgttagacgatgtaaaaatta

SEQ ID NO: 622 - RNA, 21 nt, synthetic construct
  source 1..21: mol_type = other RNA
  modified_base 1..6: mod_base = OTHER; note = 2'-O-Methyl ribonucleotide
  modified_base 7: mod_base = OTHER; note = 2'-fluoro ribonucleotide
  modified_base 8: mod_base = OTHER; note = 2'-O-Methyl ribonucleotide
  modified_base 9: mod_base = OTHER; note = 2'-fluoro ribonucleotide
  modified_base 10: mod_base = OTHER; note = 2'-O-Methyl ribonucleotide
  modified_base 11: mod_base = OTHER; note = 2'-fluoro ribonucleotide
  modified_base 12..21: mod_base = OTHER; note = 2'-O-Methyl ribonucleotide
  modified_base 1..3: mod_base = OTHER; note = phosphorothioate linkage
ttagacgatgtaaaaatttta

SEQ ID NO: 623 - RNA, 21 nt, synthetic construct
  source 1..21: mol_type = other RNA
  modified_base 1..6: mod_base = OTHER; note = 2'-O-Methyl ribonucleotide
  modified_base 7: mod_base = OTHER; note = 2'-fluoro ribonucleotide
  modified_base 8: mod_base = OTHER; note = 2'-O-Methyl ribonucleotide
  modified_base 9: mod_base = OTHER; note = 2'-fluoro ribonucleotide
  modified_base 10: mod_base = OTHER; note = 2'-O-Methyl ribonucleotide
  modified_base 11: mod_base = OTHER; note = 2'-fluoro ribonucleotide
  modified_base 12..21: mod_base = OTHER; note = 2'-O-Methyl ribonucleotide
  modified_base 1..3: mod_base = OTHER; note = phosphorothioate linkage
aaattttagccaatggcctca

SEQ ID NO: 624 - RNA, 21 nt, synthetic construct
  source 1..21: mol_type = other RNA
  modified_base 1..6: mod_base = OTHER; note = 2'-O-Methyl ribonucleotide
  modified_base 7: mod_base = OTHER; note = 2'-fluoro ribonucleotide
  modified_base 8: mod_base = OTHER; note = 2'-O-Methyl ribonucleotide
  modified_base 9: mod_base = OTHER; note = 2'-fluoro ribonucleotide
  modified_base 10: mod_base = OTHER; note = 2'-O-Methyl ribonucleotide
  modified_base 11: mod_base = OTHER; note = 2'-fluoro ribonucleotide
  modified_base 12..21: mod_base = OTHER; note = 2'-O-Methyl ribonucleotide
  modified_base 1..3: mod_base = OTHER; note = phosphorothioate linkage
aattttagccaatggcctcca

SEQ ID NO: 625 - RNA, 21 nt, synthetic construct
  source 1..21: mol_type = other RNA
  modified_base 1..6: mod_base = OTHER; note = 2'-O-Methyl ribonucleotide
  modified_base 7: mod_base = OTHER; note = 2'-fluoro ribonucleotide
  modified_base 8: mod_base = OTHER; note = 2'-O-Methyl ribonucleotide
  modified_base 9: mod_base = OTHER; note = 2'-fluoro ribonucleotide
  modified_base 10: mod_base = OTHER; note = 2'-O-Methyl ribonucleotide
  modified_base 11: mod_base = OTHER; note = 2'-fluoro ribonucleotide
  modified_base 12..21: mod_base = OTHER; note = 2'-O-Methyl ribonucleotide
  modified_base 1..3: mod_base = OTHER; note = phosphorothioate linkage
ttagccaatggcctccttcaa

SEQ ID NO: 626 - RNA, 21 nt, synthetic construct
  source 1..21: mol_type = other RNA
  modified_base 1..6: mod_base = OTHER; note = 2'-O-Methyl ribonucleotide
  modified_base 7: mod_base = OTHER; note = 2'-fluoro ribonucleotide
  modified_base 8: mod_base = OTHER; note = 2'-O-Methyl ribonucleotide
  modified_base 9: mod_base = OTHER; note = 2'-fluoro ribonucleotide
  modified_base 10: mod_base = OTHER; note = 2'-O-Methyl ribonucleotide
  modified_base 11: mod_base = OTHER; note = 2'-fluoro ribonucleotide
  modified_base 12..21: mod_base = OTHER; note = 2'-O-Methyl ribonucleotide
  modified_base 1..3: mod_base = OTHER; note = phosphorothioate linkage
ccaatggcctccttcagttga

SEQ ID NO: 627 - RNA, 21 nt, synthetic construct
  source 1..21: mol_type = other RNA
  modified_base 1..6: mod_base = OTHER; note = 2'-O-Methyl ribonucleotide
  modified_base 7: mod_base = OTHER; note = 2'-fluoro ribonucleotide
  modified_base 8: mod_base = OTHER; note = 2'-O-Methyl ribonucleotide
  modified_base 9: mod_base = OTHER; note = 2'-fluoro ribonucleotide
  modified_base 10: mod_base = OTHER; note = 2'-O-Methyl ribonucleotide
  modified_base 11: mod_base = OTHER; note = 2'-fluoro ribonucleotide
  modified_base 12..21: mod_base = OTHER; note = 2'-O-Methyl ribonucleotide
  modified_base 1..3: mod_base = OTHER; note = phosphorothioate linkage
caatggcctccttcagttgga

SEQ ID NO: 628 - RNA, 21 nt, synthetic construct
  source 1..21: mol_type = other RNA
  modified_base 1..6: mod_base = OTHER; note = 2'-O-Methyl ribonucleotide
  modified_base 7: mod_base = OTHER; note = 2'-fluoro ribonucleotide
  modified_base 8: mod_base = OTHER; note = 2'-O-Methyl ribonucleotide
  modified_base 9: mod_base = OTHER; note = 2'-fluoro ribonucleotide
  modified_base 10: mod_base = OTHER; note = 2'-O-Methyl ribonucleotide
  modified_base 11: mod_base = OTHER; note = 2'-fluoro ribonucleotide
  modified_base 12..21: mod_base = OTHER; note = 2'-O-Methyl ribonucleotide
  modified_base 1..3: mod_base = OTHER; note = phosphorothioate linkage
aatggcctccttcagttggga

SEQ ID NO: 629 - RNA, 21 nt, synthetic construct
  source 1..21: mol_type = other RNA
  modified_base 1..6: mod_base = OTHER; note = 2'-O-Methyl ribonucleotide
  modified_base 7: mod_base = OTHER; note = 2'-fluoro ribonucleotide
  modified_base 8: mod_base = OTHER; note = 2'-O-Methyl ribonucleotide
  modified_base 9: mod_base = OTHER; note = 2'-fluoro ribonucleotide
  modified_base 10: mod_base = OTHER; note = 2'-O-Methyl ribonucleotide
  modified_base 11: mod_base = OTHER; note = 2'-fluoro ribonucleotide
  modified_base 12..21: mod_base = OTHER; note = 2'-O-Methyl ribonucleotide
  modified_base 1..3: mod_base = OTHER; note = phosphorothioate linkage
ctccttcagttgggacatgga

SEQ ID NO: 630 - RNA, 21 nt, synthetic construct
  source 1..21: mol_type = other RNA
  modified_base 1..6: mod_base = OTHER; note = 2'-O-Methyl ribonucleotide
  modified_base 7: mod_base = OTHER; note = 2'-fluoro ribonucleotide
  modified_base 8: mod_base = OTHER; note = 2'-O-Methyl ribonucleotide
  modified_base 9: mod_base = OTHER; note = 2'-fluoro ribonucleotide
  modified_base 10: mod_base = OTHER; note = 2'-O-Methyl ribonucleotide
  modified_base 11: mod_base = OTHER; note = 2'-fluoro ribonucleotide
  modified_base 12..21: mod_base = OTHER; note = 2'-O-Methyl ribonucleotide
  modified_base 1..3: mod_base = OTHER; note = phosphorothioate linkage
cttcagttgggacatggtcta

SEQ ID NO: 631 - RNA, 21 nt, synthetic construct
  source 1..21: mol_type = other RNA
  modified_base 1..6: mod_base = OTHER; note = 2'-O-Methyl ribonucleotide
  modified_base 7: mod_base = OTHER; note = 2'-fluoro ribonucleotide
  modified_base 8: mod_base = OTHER; note = 2'-O-Methyl ribonucleotide
  modified_base 9: mod_base = OTHER; note = 2'-fluoro ribonucleotide
  modified_base 10: mod_base = OTHER; note = 2'-O-Methyl ribonucleotide
  modified_base 11: mod_base = OTHER; note = 2'-fluoro ribonucleotide
  modified_base 12..21: mod_base = OTHER; note = 2'-O-Methyl ribonucleotide
  modified_base 1..3: mod_base = OTHER; note = phosphorothioate linkage
agttgggacatggtcttaaaa

SEQ ID NO: 632 - RNA, 21 nt, synthetic construct
  source 1..21: mol_type = other RNA
  modified_base 1..6: mod_base = OTHER; note = 2'-O-Methyl ribonucleotide
  modified_base 7: mod_base = OTHER; note = 2'-fluoro ribonucleotide
  modified_base 8: mod_base = OTHER; note = 2'-O-Methyl ribonucleotide
  modified_base 9: mod_base = OTHER; note = 2'-fluoro ribonucleotide
  modified_base 10: mod_base = OTHER; note = 2'-O-Methyl ribonucleotide
  modified_base 11: mod_base = OTHER; note = 2'-fluoro ribonucleotide
  modified_base 12..21: mod_base = OTHER; note = 2'-O-Methyl ribonucleotide
  modified_base 1..3: mod_base = OTHER; note = phosphorothioate linkage
ttgggacatggtcttaaagaa

SEQ ID NO: 633 - RNA, 21 nt, synthetic construct
  source 1..21: mol_type = other RNA
  modified_base 1..6: mod_base = OTHER; note = 2'-O-Methyl ribonucleotide
  modified_base 7: mod_base = OTHER; note = 2'-fluoro ribonucleotide
  modified_base 8: mod_base = OTHER; note = 2'-O-Methyl ribonucleotide
  modified_base 9: mod_base = OTHER; note = 2'-fluoro ribonucleotide
  modified_base 10: mod_base = OTHER; note = 2'-O-Methyl ribonucleotide
  modified_base 11: mod_base = OTHER; note = 2'-fluoro ribonucleotide
  modified_base 12..21: mod_base = OTHER; note = 2'-O-Methyl ribonucleotide
  modified_base 1..3: mod_base = OTHER; note = phosphorothioate linkage
gggacatggtcttaaagacta

SEQ ID NO: 634 - RNA, 21 nt, synthetic construct
  source 1..21: mol_type = other RNA
  modified_base 1..6: mod_base = OTHER; note = 2'-O-Methyl ribonucleotide
  modified_base 7: mod_base = OTHER; note = 2'-fluoro ribonucleotide
  modified_base 8: mod_base = OTHER; note = 2'-O-Methyl ribonucleotide
  modified_base 9: mod_base = OTHER; note = 2'-fluoro ribonucleotide
  modified_base 10: mod_base = OTHER; note = 2'-O-Methyl ribonucleotide
  modified_base 11: mod_base = OTHER; note = 2'-fluoro ribonucleotide
  modified_base 12..21: mod_base = OTHER; note = 2'-O-Methyl ribonucleotide
  modified_base 1..3: mod_base = OTHER; note = phosphorothioate linkage
ggacatggtcttaaagactta

SEQ ID NO: 635 - RNA, 21 nt, synthetic construct
  source 1..21: mol_type = other RNA
  modified_base 1..6: mod_base = OTHER; note = 2'-O-Methyl ribonucleotide
  modified_base 7: mod_base = OTHER; note = 2'-fluoro ribonucleotide
  modified_base 8: mod_base = OTHER; note = 2'-O-Methyl ribonucleotide
  modified_base 9: mod_base = OTHER; note = 2'-fluoro ribonucleotide
  modified_base 10: mod_base = OTHER; note = 2'-O-Methyl ribonucleotide
  modified_base 11: mod_base = OTHER; note = 2'-fluoro ribonucleotide
  modified_base 12..21: mod_base = OTHER; note = 2'-O-Methyl ribonucleotide
  modified_base 1..3: mod_base = OTHER; note = phosphorothioate linkage
gacatggtcttaaagacttta

SEQ ID NO: 636 - RNA, 21 nt, synthetic construct
  source 1..21: mol_type = other RNA
  modified_base 1..6: mod_base = OTHER; note = 2'-O-Methyl ribonucleotide
  modified_base 7: mod_base = OTHER; note = 2'-fluoro ribonucleotide
  modified_base 8: mod_base = OTHER; note = 2'-O-Methyl ribonucleotide
  modified_base 9: mod_base = OTHER; note = 2'-fluoro ribonucleotide
  modified_base 10: mod_base = OTHER; note = 2'-O-Methyl ribonucleotide
  modified_base 11: mod_base = OTHER; note = 2'-fluoro ribonucleotide
  modified_base 12..21: mod_base = OTHER; note = 2'-O-Methyl ribonucleotide
  modified_base 1..3: mod_base = OTHER; note = phosphorothioate linkage
acatggtcttaaagactttga

SEQ ID NO: 637 - RNA, 21 nt, synthetic construct
  source 1..21: mol_type = other RNA
  modified_base 1..6: mod_base = OTHER; note = 2'-O-Methyl ribonucleotide
  modified_base 7: mod_base = OTHER; note = 2'-fluoro ribonucleotide
  modified_base 8: mod_base = OTHER; note = 2'-O-Methyl ribonucleotide
  modified_base 9: mod_base = OTHER; note = 2'-fluoro ribonucleotide
  modified_base 10: mod_base = OTHER; note = 2'-O-Methyl ribonucleotide
  modified_base 11: mod_base = OTHER; note = 2'-fluoro ribonucleotide
  modified_base 12..21: mod_base = OTHER; note = 2'-O-Methyl ribonucleotide
  modified_base 1..3: mod_base = OTHER; note = phosphorothioate linkage
catggtcttaaagactttgta

SEQ ID NO: 638 - RNA, 21 nt, synthetic construct
  source 1..21: mol_type = other RNA
  modified_base 1..6: mod_base = OTHER; note = 2'-O-Methyl ribonucleotide
  modified_base 7: mod_base = OTHER; note = 2'-fluoro ribonucleotide
  modified_base 8: mod_base = OTHER; note = 2'-O-Methyl ribonucleotide
  modified_base 9: mod_base = OTHER; note = 2'-fluoro ribonucleotide
  modified_base 10: mod_base = OTHER; note = 2'-O-Methyl ribonucleotide
  modified_base 11: mod_base = OTHER; note = 2'-fluoro ribonucleotide
  modified_base 12..21: mod_base = OTHER; note = 2'-O-Methyl ribonucleotide
  modified_base 1..3: mod_base = OTHER; note = phosphorothioate linkage
ttaaagactttgtccataaga

SEQ ID NO: 639 - RNA, 21 nt, synthetic construct
  source 1..21: mol_type = other RNA
  modified_base 1..6: mod_base = OTHER; note = 2'-O-Methyl ribonucleotide
  modified_base 7: mod_base = OTHER; note = 2'-fluoro ribonucleotide
  modified_base 8: mod_base = OTHER; note = 2'-O-Methyl ribonucleotide
  modified_base 9: mod_base = OTHER; note = 2'-fluoro ribonucleotide
  modified_base 10: mod_base = OTHER; note = 2'-O-Methyl ribonucleotide
  modified_base 11: mod_base = OTHER; note = 2'-fluoro ribonucleotide
  modified_base 12..21: mod_base = OTHER; note = 2'-O-Methyl ribonucleotide
  modified_base 1..3: mod_base = OTHER; note = phosphorothioate linkage
acgaagggccaaattaatgaa

SEQ ID NO: 640 - RNA, 21 nt, synthetic construct
  source 1..21: mol_type = other RNA
  modified_base 1..6: mod_base = OTHER; note = 2'-O-Methyl ribonucleotide
  modified_base 7: mod_base = OTHER; note = 2'-fluoro ribonucleotide
  modified_base 8: mod_base = OTHER; note = 2'-O-Methyl ribonucleotide
  modified_base 9: mod_base = OTHER; note = 2'-fluoro ribonucleotide
  modified_base 10: mod_base = OTHER; note = 2'-O-Methyl ribonucleotide
  modified_base 11: mod_base = OTHER; note = 2'-fluoro ribonucleotide
  modified_base 12..21: mod_base = OTHER; note = 2'-O-Methyl ribonucleotide
  modified_base 1..3: mod_base = OTHER; note = phosphorothioate linkage
actcaacatatttgatcagta

SEQ ID NO: 641 - RNA, 21 nt, synthetic construct
  source 1..21: mol_type = other RNA
  modified_base 1..6: mod_base = OTHER; note = 2'-O-Methyl ribonucleotide
  modified_base 7: mod_base = OTHER; note = 2'-fluoro ribonucleotide
  modified_base 8: mod_base = OTHER; note = 2'-O-Methyl ribonucleotide
  modified_base 9: mod_base = OTHER; note = 2'-fluoro ribonucleotide
  modified_base 10: mod_base = OTHER; note = 2'-O-Methyl ribonucleotide
  modified_base 11: mod_base = OTHER; note = 2'-fluoro ribonucleotide
  modified_base 12..21: mod_base = OTHER; note = 2'-O-Methyl ribonucleotide
  modified_base 1..3: mod_base = OTHER; note = phosphorothioate linkage
acatatttgatcagtctttta

SEQ ID NO: 642 - RNA, 21 nt, synthetic construct
  source 1..21: mol_type = other RNA
  modified_base 1..6: mod_base = OTHER; note = 2'-O-Methyl ribonucleotide
  modified_base 7: mod_base = OTHER; note = 2'-fluoro ribonucleotide
  modified_base 8: mod_base = OTHER; note = 2'-O-Methyl ribonucleotide
  modified_base 9: mod_base = OTHER; note = 2'-fluoro ribonucleotide
  modified_base 10: mod_base = OTHER; note = 2'-O-Methyl ribonucleotide
  modified_base 11: mod_base = OTHER; note = 2'-fluoro ribonucleotide
  modified_base 12..21: mod_base = OTHER; note = 2'-O-Methyl ribonucleotide
  modified_base 1..3: mod_base = OTHER; note = phosphorothioate linkage
gatcagtctttttatgatcta

SEQ ID NO: 643 - RNA, 21 nt, synthetic construct
  source 1..21: mol_type = other RNA
  modified_base 1..6: mod_base = OTHER; note = 2'-O-Methyl ribonucleotide
  modified_base 7: mod_base = OTHER; note = 2'-fluoro ribonucleotide
  modified_base 8: mod_base = OTHER; note = 2'-O-Methyl ribonucleotide
  modified_base 9: mod_base = OTHER; note = 2'-fluoro ribonucleotide
  modified_base 10: mod_base = OTHER; note = 2'-O-Methyl ribonucleotide
  modified_base 11: mod_base = OTHER; note = 2'-fluoro ribonucleotide
  modified_base 12..21: mod_base = OTHER; note = 2'-O-Methyl ribonucleotide
  modified_base 1..3: mod_base = OTHER; note = phosphorothioate linkage
atcagtctttttatgatctaa

SEQ ID NO: 644 - RNA, 21 nt, synthetic construct
  source 1..21: mol_type = other RNA
  modified_base 1..6: mod_base = OTHER; note = 2'-O-Methyl ribonucleotide
  modified_base 7: mod_base = OTHER; note = 2'-fluoro ribonucleotide
  modified_base 8: mod_base = OTHER; note = 2'-O-Methyl ribonucleotide
  modified_base 9: mod_base = OTHER; note = 2'-fluoro ribonucleotide
  modified_base 10: mod_base = OTHER; note = 2'-O-Methyl ribonucleotide
  modified_base 11: mod_base = OTHER; note = 2'-fluoro ribonucleotide
  modified_base 12..21: mod_base = OTHER; note = 2'-O-Methyl ribonucleotide
  modified_base 1..3: mod_base = OTHER; note = phosphorothioate linkage
acatataaactacaagtcaaa

SEQ ID NO: 645 - RNA, 21 nt, synthetic construct
  source 1..21: mol_type = other RNA
  modified_base 1..6: mod_base = OTHER; note = 2'-O-Methyl ribonucleotide
  modified_base 7: mod_base = OTHER; note = 2'-fluoro ribonucleotide
  modified_base 8: mod_base = OTHER; note = 2'-O-Methyl ribonucleotide
  modified_base 9: mod_base = OTHER; note = 2'-fluoro ribonucleotide
  modified_base 10: mod_base = OTHER; note = 2'-O-Methyl ribonucleotide
  modified_base 11: mod_base = OTHER; note = 2'-fluoro ribonucleotide
  modified_base 12..21: mod_base = OTHER; note = 2'-O-Methyl ribonucleotide
  modified_base 1..3: mod_base = OTHER; note = phosphorothioate linkage
tcacttgaactcaactcaaaa

SEQ ID NO: 646 - RNA, 21 nt, synthetic construct
  source 1..21: mol_type = other RNA
  modified_base 1..6: mod_base = OTHER; note = 2'-O-Methyl ribonucleotide
  modified_base 7: mod_base = OTHER; note = 2'-fluoro ribonucleotide
  modified_base 8: mod_base = OTHER; note = 2'-O-Methyl ribonucleotide
  modified_base 9: mod_base = OTHER; note = 2'-fluoro ribonucleotide
  modified_base 10: mod_base = OTHER; note = 2'-O-Methyl ribonucleotide
  modified_base 11: mod_base = OTHER; note = 2'-fluoro ribonucleotide
  modified_base 12..21: mod_base = OTHER; note = 2'-O-Methyl ribonucleotide
  modified_base 1..3: mod_base = OTHER; note = phosphorothioate linkage
caaaacttgaaagcctcctaa

SEQ ID NO: 647 - RNA, 21 nt, synthetic construct
  source 1..21: mol_type = other RNA
  modified_base 1..6: mod_base = OTHER; note = 2'-O-Methyl ribonucleotide
  modified_base 7: mod_base = OTHER; note = 2'-fluoro ribonucleotide
  modified_base 8: mod_base = OTHER; note = 2'-O-Methyl ribonucleotide
  modified_base 9: mod_base = OTHER; note = 2'-fluoro ribonucleotide
  modified_base 10: mod_base = OTHER; note = 2'-O-Methyl ribonucleotide
  modified_base 11: mod_base = OTHER; note = 2'-fluoro ribonucleotide
  modified_base 12..21: mod_base = OTHER; note = 2'-O-Methyl ribonucleotide
  modified_base 1..3: mod_base = OTHER; note = phosphorothioate linkage
aaatatttagaagagcaacta

SEQ ID NO: 648 - RNA, 21 nt, synthetic construct
  source 1..21: mol_type = other RNA
  modified_base 1..6: mod_base = OTHER; note = 2'-O-Methyl ribonucleotide
  modified_base 7: mod_base = OTHER; note = 2'-fluoro ribonucleotide
  modified_base 8: mod_base = OTHER; note = 2'-O-Methyl ribonucleotide
  modified_base 9: mod_base = OTHER; note = 2'-fluoro ribonucleotide
  modified_base 10: mod_base = OTHER; note = 2'-O-Methyl ribonucleotide
  modified_base 11: mod_base = OTHER; note = 2'-fluoro ribonucleotide
  modified_base 12..21: mod_base = OTHER; note = 2'-O-Methyl ribonucleotide
  modified_base 1..3: mod_base = OTHER; note = phosphorothioate linkage
agaagagcaactaactaacta

SEQ ID NO: 649 - RNA, 21 nt, synthetic construct
  source 1..21: mol_type = other RNA
  modified_base 1..6: mod_base = OTHER; note = 2'-O-Methyl ribonucleotide
  modified_base 7: mod_base = OTHER; note = 2'-fluoro ribonucleotide
  modified_base 8: mod_base = OTHER; note = 2'-O-Methyl ribonucleotide
  modified_base 9: mod_base = OTHER; note = 2'-fluoro ribonucleotide
  modified_base 10: mod_base = OTHER; note = 2'-O-Methyl ribonucleotide
  modified_base 11: mod_base = OTHER; note = 2'-fluoro ribonucleotide
  modified_base 12..21: mod_base = OTHER; note = 2'-O-Methyl ribonucleotide
  modified_base 1..3: mod_base = OTHER; note = phosphorothioate linkage
aagagcaactaactaacttaa

SEQ ID NO: 650 - RNA, 21 nt, synthetic construct
  source 1..21: mol_type = other RNA
  modified_base 1..6: mod_base = OTHER; note = 2'-O-Methyl ribonucleotide
  modified_base 7: mod_base = OTHER; note = 2'-fluoro ribonucleotide
  modified_base 8: mod_base = OTHER; note = 2'-O-Methyl ribonucleotide
  modified_base 9: mod_base = OTHER; note = 2'-fluoro ribonucleotide
  modified_base 10: mod_base = OTHER; note = 2'-O-Methyl ribonucleotide
  modified_base 11: mod_base = OTHER; note = 2'-fluoro ribonucleotide
  modified_base 12..21: mod_base = OTHER; note = 2'-O-Methyl ribonucleotide
  modified_base 1..3: mod_base = OTHER; note = phosphorothioate linkage
agagcaactaactaacttaaa

SEQ ID NO: 651 - RNA, 21 nt, synthetic construct
  source 1..21: mol_type = other RNA
  modified_base 1..6: mod_base = OTHER; note = 2'-O-Methyl ribonucleotide
  modified_base 7: mod_base = OTHER; note = 2'-fluoro ribonucleotide
  modified_base 8: mod_base = OTHER; note = 2'-O-Methyl ribonucleotide
  modified_base 9: mod_base = OTHER; note = 2'-fluoro ribonucleotide
  modified_base 10: mod_base = OTHER; note = 2'-O-Methyl ribonucleotide
  modified_base 11: mod_base = OTHER; note = 2'-fluoro ribonucleotide
  modified_base 12..21: mod_base = OTHER; note = 2'-O-Methyl ribonucleotide
  modified_base 1..3: mod_base = OTHER; note = phosphorothioate linkage
gagcaactaactaacttaata

SEQ ID NO: 652 - RNA, 21 nt, synthetic construct
  source 1..21: mol_type = other RNA
  modified_base 1..6: mod_base = OTHER; note = 2'-O-Methyl ribonucleotide
  modified_base 7: mod_base = OTHER; note = 2'-fluoro ribonucleotide
  modified_base 8: mod_base = OTHER; note = 2'-O-Methyl ribonucleotide
  modified_base 9: mod_base = OTHER; note = 2'-fluoro ribonucleotide
  modified_base 10: mod_base = OTHER; note = 2'-O-Methyl ribonucleotide
  modified_base 11: mod_base = OTHER; note = 2'-fluoro ribonucleotide
  modified_base 12..21: mod_base = OTHER; note = 2'-O-Methyl ribonucleotide
  modified_base 1..3: mod_base = OTHER; note = phosphorothioate linkage
taacttaattcaaaatcaaca

SEQ ID NO: 653 - RNA, 21 nt, synthetic construct
  source 1..21: mol_type = other RNA
  modified_base 1..6: mod_base = OTHER; note = 2'-O-Methyl ribonucleotide
  modified_base 7: mod_base = OTHER; note = 2'-fluoro ribonucleotide
  modified_base 8: mod_base = OTHER; note = 2'-O-Methyl ribonucleotide
  modified_base 9: mod_base = OTHER; note = 2'-fluoro ribonucleotide
  modified_base 10: mod_base = OTHER; note = 2'-O-Methyl ribonucleotide
  modified_base 11: mod_base = OTHER; note = 2'-fluoro ribonucleotide
  modified_base 12..21: mod_base = OTHER; note = 2'-O-Methyl ribonucleotide
  modified_base 1..3: mod_base = OTHER; note = phosphorothioate linkage
acccagaagtaacttcactta

SEQ ID NO: 654 - RNA, 21 nt, synthetic construct
  source 1..21: mol_type = other RNA
  modified_base 1..6: mod_base = OTHER; note = 2'-O-Methyl ribonucleotide
  modified_base 7: mod_base = OTHER; note = 2'-fluoro ribonucleotide
  modified_base 8: mod_base = OTHER; note = 2'-O-Methyl ribonucleotide
  modified_base 9: mod_base = OTHER; note = 2'-fluoro ribonucleotide
  modified_base 10: mod_base = OTHER; note = 2'-O-Methyl ribonucleotide
  modified_base 11: mod_base = OTHER; note = 2'-fluoro ribonucleotide
  modified_base 12..21: mod_base = OTHER; note = 2'-O-Methyl ribonucleotide
  modified_base 1..3: mod_base = OTHER; note = phosphorothioate linkage
cccagaagtaacttcacttaa

SEQ ID NO: 655 - RNA, 21 nt, synthetic construct
  source 1..21: mol_type = other RNA
  modified_base 1..6: mod_base = OTHER; note = 2'-O-Methyl ribonucleotide
  modified_base 7: mod_base = OTHER; note = 2'-fluoro ribonucleotide
  modified_base 8: mod_base = OTHER; note = 2'-O-Methyl ribonucleotide
  modified_base 9: mod_base = OTHER; note = 2'-fluoro ribonucleotide
  modified_base 10: mod_base = OTHER; note = 2'-O-Methyl ribonucleotide
  modified_base 11: mod_base = OTHER; note = 2'-fluoro ribonucleotide
  modified_base 12..21: mod_base = OTHER; note = 2'-O-Methyl ribonucleotide
  modified_base 1..3: mod_base = OTHER; note = phosphorothioate linkage
aaaaacaagataatagcatca

SEQ ID NO: 656 - RNA, 21 nt, synthetic construct
  source 1..21: mol_type = other RNA
  modified_base 1..6: mod_base = OTHER; note = 2'-O-Methyl ribonucleotide
  modified_base 7: mod_base = OTHER; note = 2'-fluoro ribonucleotide
  modified_base 8: mod_base = OTHER; note = 2'-O-Methyl ribonucleotide
  modified_base 9: mod_base = OTHER; note = 2'-fluoro ribonucleotide
  modified_base 10: mod_base = OTHER; note = 2'-O-Methyl ribonucleotide
  modified_base 11: mod_base = OTHER; note = 2'-fluoro ribonucleotide
  modified_base 12..21: mod_base = OTHER; note = 2'-O-Methyl ribonucleotide
  modified_base 1..3: mod_base = OTHER; note = phosphorothioate linkage
aaacaagataatagcatcaaa

SEQ ID NO: 657 - RNA, 21 nt, synthetic construct
  source 1..21: mol_type = other RNA
  modified_base 1..6: mod_base = OTHER; note = 2'-O-Methyl ribonucleotide
  modified_base 7: mod_base = OTHER; note = 2'-fluoro ribonucleotide
  modified_base 8: mod_base = OTHER; note = 2'-O-Methyl ribonucleotide
  modified_base 9: mod_base = OTHER; note = 2'-fluoro ribonucleotide
  modified_base 10: mod_base = OTHER; note = 2'-O-Methyl ribonucleotide
  modified_base 11: mod_base = OTHER; note = 2'-fluoro ribonucleotide
  modified_base 12..21: mod_base = OTHER; note = 2'-O-Methyl ribonucleotide
  modified_base 1..3: mod_base = OTHER; note = phosphorothioate linkage
agataatagcatcaaagacca

SEQ ID NO: 658 - RNA, 21 nt, synthetic construct
  source 1..21: mol_type = other RNA
  modified_base 1..6: mod_base = OTHER; note = 2'-O-Methyl ribonucleotide
  modified_base 7: mod_base = OTHER; note = 2'-fluoro ribonucleotide
  modified_base 8: mod_base = OTHER; note = 2'-O-Methyl ribonucleotide
  modified_base 9: mod_base = OTHER; note = 2'-fluoro ribonucleotide
  modified_base 10: mod_base = OTHER; note = 2'-O-Methyl ribonucleotide
  modified_base 11: mod_base = OTHER; note = 2'-fluoro ribonucleotide
  modified_base 12..21: mod_base = OTHER; note = 2'-O-Methyl ribonucleotide
  modified_base 1..3: mod_base = OTHER; note = phosphorothioate linkage
ataatagcatcaaagacctta

SEQ ID NO: 659 - RNA, 21 nt, synthetic construct
  source 1..21: mol_type = other RNA
  modified_base 1..6: mod_base = OTHER; note = 2'-O-Methyl ribonucleotide
  modified_base 7: mod_base = OTHER; note = 2'-fluoro ribonucleotide
  modified_base 8: mod_base = OTHER; note = 2'-O-Methyl ribonucleotide
  modified_base 9: mod_base = OTHER; note = 2'-fluoro ribonucleotide
  modified_base 10: mod_base = OTHER; note = 2'-O-Methyl ribonucleotide
  modified_base 11: mod_base = OTHER; note = 2'-fluoro ribonucleotide
  modified_base 12..21: mod_base = OTHER; note = 2'-O-Methyl ribonucleotide
  modified_base 1..3: mod_base = OTHER; note = phosphorothioate linkage
caattaaaccaacagcataga

SEQ ID NO: 660 - RNA, 21 nt, synthetic construct
  source 1..21: mol_type = other RNA
  modified_base 1..6: mod_base = OTHER; note = 2'-O-Methyl ribonucleotide
  modified_base 7: mod_base = OTHER; note = 2'-fluoro ribonucleotide
  modified_base 8: mod_base = OTHER; note = 2'-O-Methyl ribonucleotide
  modified_base 9: mod_base = OTHER; note = 2'-fluoro ribonucleotide
  modified_base 10: mod_base = OTHER; note = 2'-O-Methyl ribonucleotide
  modified_base 11: mod_base = OTHER; note = 2'-fluoro ribonucleotide
  modified_base 12..21: mod_base = OTHER; note = 2'-O-Methyl ribonucleotide
  modified_base 1..3: mod_base = OTHER; note = phosphorothioate linkage
aaccaacagcatagtcaaata

SEQ ID NO: 661 - RNA, 21 nt, synthetic construct
  source 1..21: mol_type = other RNA
  modified_base 1..6: mod_base = OTHER; note = 2'-O-Methyl ribonucleotide
  modified_base 7: mod_base = OTHER; note = 2'-fluoro ribonucleotide
  modified_base 8: mod_base = OTHER; note = 2'-O-Methyl ribonucleotide
  modified_base 9: mod_base = OTHER; note = 2'-fluoro ribonucleotide
  modified_base 10: mod_base = OTHER; note = 2'-O-Methyl ribonucleotide
  modified_base 11: mod_base = OTHER; note = 2'-fluoro ribonucleotide
  modified_base 12..21: mod_base = OTHER; note = 2'-O-Methyl ribonucleotide
  modified_base 1..3: mod_base = OTHER; note = phosphorothioate linkage
agccaagagcaccaagaacta

SEQ ID NO: 662 - RNA, 21 nt, synthetic construct
  source 1..21: mol_type = other RNA
  modified_base 1..6: mod_base = OTHER; note = 2'-O-Methyl ribonucleotide
  modified_base 7: mod_base = OTHER; note = 2'-fluoro ribonucleotide
  modified_base 8: mod_base = OTHER; note = 2'-O-Methyl ribonucleotide
  modified_base 9: mod_base = OTHER; note = 2'-fluoro ribonucleotide
  modified_base 10: mod_base = OTHER; note = 2'-O-Methyl ribonucleotide
  modified_base 11: mod_base = OTHER; note = 2'-fluoro ribonucleotide
  modified_base 12..21: mod_base = OTHER; note = 2'-O-Methyl ribonucleotide
  modified_base 1..3: mod_base = OTHER; note = phosphorothioate linkage
tcagacccagcaactctcaaa

SEQ ID NO: 663 - RNA, 21 nt, synthetic construct
  source 1..21: mol_type = other RNA
  modified_base 1..6: mod_base = OTHER; note = 2'-O-Methyl ribonucleotide
  modified_base 7: mod_base = OTHER; note = 2'-fluoro ribonucleotide
  modified_base 8: mod_base = OTHER; note = 2'-O-Methyl ribonucleotide
  modified_base 9: mod_base = OTHER; note = 2'-fluoro ribonucleotide
  modified_base 10: mod_base = OTHER; note = 2'-O-Methyl ribonucleotide
  modified_base 11: mod_base = OTHER; note = 2'-fluoro ribonucleotide
  modified_base 12..21: mod_base = OTHER; note = 2'-O-Methyl ribonucleotide
  modified_base 1..3: mod_base = OTHER; note = phosphorothioate linkage
cagacccagcaactctcaaga

SEQ ID NO: 664 - RNA, 21 nt, synthetic construct
  source 1..21: mol_type = other RNA
  modified_base 1..6: mod_base = OTHER; note = 2'-O-Methyl ribonucleotide
  modified_base 7: mod_base = OTHER; note = 2'-fluoro ribonucleotide
  modified_base 8: mod_base = OTHER; note = 2'-O-Methyl ribonucleotide
  modified_base 9: mod_base = OTHER; note = 2'-fluoro ribonucleotide
  modified_base 10: mod_base = OTHER; note = 2'-O-Methyl ribonucleotide
  modified_base 11: mod_base = OTHER; note = 2'-fluoro ribonucleotide
  modified_base 12..21: mod_base = OTHER; note = 2'-O-Methyl ribonucleotide
  modified_base 1..3: mod_base = OTHER; note = phosphorothioate linkage
agacccagcaactctcaagta

SEQ ID NO: 665 - RNA, 21 nt, synthetic construct
  source 1..21: mol_type = other RNA
  modified_base 1..6: mod_base = OTHER; note = 2'-O-Methyl ribonucleotide
  modified_base 7: mod_base = OTHER; note = 2'-fluoro ribonucleotide
  modified_base 8: mod_base = OTHER; note = 2'-O-Methyl ribonucleotide
  modified_base 9: mod_base = OTHER; note = 2'-fluoro ribonucleotide
  modified_base 10: mod_base = OTHER; note = 2'-O-Methyl ribonucleotide
  modified_base 11: mod_base = OTHER; note = 2'-fluoro ribonucleotide
  modified_base 12..21: mod_base = OTHER; note = 2'-O-Methyl ribonucleotide
  modified_base 1..3: mod_base = OTHER; note = phosphorothioate linkage
agcaactctcaagtttttcaa

SEQ ID NO: 666 - RNA, 21 nt, synthetic construct
  source 1..21: mol_type = other RNA
  modified_base 1..6: mod_base = OTHER; note = 2'-O-Methyl ribonucleotide
  modified_base 7: mod_base = OTHER; note = 2'-fluoro ribonucleotide
  modified_base 8: mod_base = OTHER; note = 2'-O-Methyl ribonucleotide
  modified_base 9: mod_base = OTHER; note = 2'-fluoro ribonucleotide
  modified_base 10: mod_base = OTHER; note = 2'-O-Methyl ribonucleotide
  modified_base 11: mod_base = OTHER; note = 2'-fluoro ribonucleotide
  modified_base 12..21: mod_base = OTHER; note = 2'-O-Methyl ribonucleotide
  modified_base 1..3: mod_base = OTHER; note = phosphorothioate linkage
ttatatcaggtagtccatgga

SEQ ID NO: 667 - RNA, 21 nt, synthetic construct
  source 1..21: mol_type = other RNA
  modified_base 1..6: mod_base = OTHER; note = 2'-O-Methyl ribonucleotide
  modified_base 7: mod_base = OTHER; note = 2'-fluoro ribonucleotide
  modified_base 8: mod_base = OTHER; note = 2'-O-Methyl ribonucleotide
  modified_base 9: mod_base = OTHER; note = 2'-fluoro ribonucleotide
  modified_base 10: mod_base = OTHER; note = 2'-O-Methyl ribonucleotide
  modified_base 11: mod_base = OTHER; note = 2'-fluoro ribonucleotide
  modified_base 12..21: mod_base = OTHER; note = 2'-O-Methyl ribonucleotide
  modified_base 1..3: mod_base = OTHER; note = phosphorothioate linkage
tatcaggtagtccatggacaa

SEQ ID NO: 668 - RNA, 21 nt, synthetic construct
  source 1..21: mol_type = other RNA
  modified_base 1..6: mod_base = OTHER; note = 2'-O-Methyl ribonucleotide
  modified_base 7: mod_base = OTHER; note = 2'-fluoro ribonucleotide
  modified_base 8: mod_base = OTHER; note = 2'-O-Methyl ribonucleotide
  modified_base 9: mod_base = OTHER; note = 2'-fluoro ribonucleotide
  modified_base 10: mod_base = OTHER; note = 2'-O-Methyl ribonucleotide
  modified_base 11: mod_base = OTHER; note = 2'-fluoro ribonucleotide
  modified_base 12..21: mod_base = OTHER; note = 2'-O-Methyl ribonucleotide
  modified_base 1..3: mod_base = OTHER; note = phosphorothioate linkage
atcaggtagtccatggacata

SEQ ID NO: 669 - RNA, 21 nt, synthetic construct
  source 1..21: mol_type = other RNA
  modified_base 1..6: mod_base = OTHER; note = 2'-O-Methyl ribonucleotide
  modified_base 7: mod_base = OTHER; note = 2'-fluoro ribonucleotide
  modified_base 8: mod_base = OTHER; note = 2'-O-Methyl ribonucleotide
  modified_base 9: mod_base = OTHER; note = 2'-fluoro ribonucleotide
  modified_base 10: mod_base = OTHER; note = 2'-O-Methyl ribonucleotide
  modified_base 11: mod_base = OTHER; note = 2'-fluoro ribonucleotide
  modified_base 12..21: mod_base = OTHER; note = 2'-O-Methyl ribonucleotide
  modified_base 1..3: mod_base = OTHER; note = phosphorothioate linkage
tcaggtagtccatggacatta

SEQ ID NO: 670 - RNA, 21 nt, synthetic construct
  source 1..21: mol_type = other RNA
  modified_base 1..6: mod_base = OTHER; note = 2'-O-Methyl ribonucleotide
  modified_base 7: mod_base = OTHER; note = 2'-fluoro ribonucleotide
  modified_base 8: mod_base = OTHER; note = 2'-O-Methyl ribonucleotide
  modified_base 9: mod_base = OTHER; note = 2'-fluoro ribonucleotide
  modified_base 10: mod_base = OTHER; note = 2'-O-Methyl ribonucleotide
  modified_base 11: mod_base = OTHER; note = 2'-fluoro ribonucleotide
  modified_base 12..21: mod_base = OTHER; note = 2'-O-Methyl ribonucleotide
  modified_base 1..3: mod_base = OTHER; note = phosphorothioate linkage
agtccatggacattaattcaa

SEQ ID NO: 671 - RNA, 21 nt, synthetic construct
  source 1..21: mol_type = other RNA
  modified_base 1..6: mod_base = OTHER; note = 2'-O-Methyl ribonucleotide
  modified_base 7: mod_base = OTHER; note = 2'-fluoro ribonucleotide
  modified_base 8: mod_base = OTHER; note = 2'-O-Methyl ribonucleotide
  modified_base 9: mod_base = OTHER; note = 2'-fluoro ribonucleotide
  modified_base 10: mod_base = OTHER; note = 2'-O-Methyl ribonucleotide
  modified_base 11: mod_base = OTHER; note = 2'-fluoro ribonucleotide
  modified_base 12..21: mod_base = OTHER; note = 2'-O-Methyl ribonucleotide
  modified_base 1..3: mod_base = OTHER; note = phosphorothioate linkage
gtccatggacattaattcaaa

SEQ ID NO: 672 - RNA, 21 nt, synthetic construct
  source 1..21: mol_type = other RNA
  modified_base 1..6: mod_base = OTHER; note = 2'-O-Methyl ribonucleotide
  modified_base 7: mod_base = OTHER; note = 2'-fluoro ribonucleotide
  modified_base 8: mod_base = OTHER; note = 2'-O-Methyl ribonucleotide
  modified_base 9: mod_base = OTHER; note = 2'-fluoro ribonucleotide
  modified_base 10: mod_base = OTHER; note = 2'-O-Methyl ribonucleotide
  modified_base 11: mod_base = OTHER; note = 2'-fluoro ribonucleotide
  modified_base 12..21: mod_base = OTHER; note = 2'-O-Methyl ribonucleotide
  modified_base 1..3: mod_base = OTHER; note = phosphorothioate linkage
tccatggacattaattcaaca

SEQ ID NO: 673 - RNA, 21 nt, synthetic construct
  source 1..21: mol_type = other RNA
  modified_base 1..6: mod_base = OTHER; note = 2'-O-Methyl ribonucleotide
  modified_base 7: mod_base = OTHER; note = 2'-fluoro ribonucleotide
  modified_base 8: mod_base = OTHER; note = 2'-O-Methyl ribonucleotide
  modified_base 9: mod_base = OTHER; note = 2'-fluoro ribonucleotide
  modified_base 10: mod_base = OTHER; note = 2'-O-Methyl ribonucleotide
  modified_base 11: mod_base = OTHER; note = 2'-fluoro ribonucleotide
  modified_base 12..21: mod_base = OTHER; note = 2'-O-Methyl ribonucleotide
  modified_base 1..3: mod_base = OTHER; note = phosphorothioate linkage
ggacattaattcaacatcgaa

SEQ ID NO: 674 - RNA, 21 nt, synthetic construct
  source 1..21: mol_type = other RNA
  modified_base 1..6: mod_base = OTHER; note = 2'-O-Methyl ribonucleotide
  modified_base 7: mod_base = OTHER; note = 2'-fluoro ribonucleotide
  modified_base 8: mod_base = OTHER; note = 2'-O-Methyl ribonucleotide
  modified_base 9: mod_base = OTHER; note = 2'-fluoro ribonucleotide
  modified_base 10: mod_base = OTHER; note = 2'-O-Methyl ribonucleotide
  modified_base 11: mod_base = OTHER; note = 2'-fluoro ribonucleotide
  modified_base 12..21: mod_base = OTHER; note = 2'-O-Methyl ribonucleotide
  modified_base 1..3: mod_base = OTHER; note = phosphorothioate linkage
acattaattcaacatcgaata

SEQ ID NO: 675 - RNA, 21 nt, synthetic construct
  source 1..21: mol_type = other RNA
  modified_base 1..6: mod_base = OTHER; note = 2'-O-Methyl ribonucleotide
  modified_base 7: mod_base = OTHER; note = 2'-fluoro ribonucleotide
  modified_base 8: mod_base = OTHER; note = 2'-O-Methyl ribonucleotide
  modified_base 9: mod_base = OTHER; note = 2'-fluoro ribonucleotide
  modified_base 10: mod_base = OTHER; note = 2'-O-Methyl ribonucleotide
  modified_base 11: mod_base = OTHER; note = 2'-fluoro ribonucleotide
  modified_base 12..21: mod_base = OTHER; note = 2'-O-Methyl ribonucleotide
  modified_base 1..3: mod_base = OTHER; note = phosphorothioate linkage
cattaattcaacatcgaataa

SEQ ID NO: 676 - RNA, 21 nt, synthetic construct
  source 1..21: mol_type = other RNA
  modified_base 1..6: mod_base = OTHER; note = 2'-O-Methyl ribonucleotide
  modified_base 7: mod_base = OTHER; note = 2'-fluoro ribonucleotide
  modified_base 8: mod_base = OTHER; note = 2'-O-Methyl ribonucleotide
  modified_base 9: mod_base = OTHER; note = 2'-fluoro ribonucleotide
  modified_base 10: mod_base = OTHER; note = 2'-O-Methyl ribonucleotide
  modified_base 11: mod_base = OTHER; note = 2'-fluoro ribonucleotide
  modified_base 12..21: mod_base = OTHER; note = 2'-O-Methyl ribonucleotide
  modified_base 1..3: mod_base = OTHER; note = phosphorothioate linkage
ttaattcaacatcgaatagaa

SEQ ID NO: 677 - RNA, 21 nt, synthetic construct
  source 1..21: mol_type = other RNA
  modified_base 1..6: mod_base = OTHER; note = 2'-O-Methyl ribonucleotide
  modified_base 7: mod_base = OTHER; note = 2'-fluoro ribonucleotide
  modified_base 8: mod_base = OTHER; note = 2'-O-Methyl ribonucleotide
  modified_base 9: mod_base = OTHER; note = 2'-fluoro ribonucleotide
  modified_base 10: mod_base = OTHER; note = 2'-O-Methyl ribonucleotide
  modified_base 11: mod_base = OTHER; note = 2'-fluoro ribonucleotide
  modified_base 12..21: mod_base = OTHER; note = 2'-O-Methyl ribonucleotide
  modified_base 1..3: mod_base = OTHER; note = phosphorothioate linkage
taattcaacatcgaatagata

SEQ ID NO: 678 - RNA, 21 nt, synthetic construct
  source 1..21: mol_type = other RNA
  modified_base 1..6: mod_base = OTHER; note = 2'-O-Methyl ribonucleotide
  modified_base 7: mod_base = OTHER; note = 2'-fluoro ribonucleotide
  modified_base 8: mod_base = OTHER; note = 2'-O-Methyl ribonucleotide
  modified_base 9: mod_base = OTHER; note = 2'-fluoro ribonucleotide
  modified_base 10: mod_base = OTHER; note = 2'-O-Methyl ribonucleotide
  modified_base 11: mod_base = OTHER; note = 2'-fluoro ribonucleotide
  modified_base 12..21: mod_base = OTHER; note = 2'-O-Methyl ribonucleotide
  modified_base 1..3: mod_base = OTHER; note = phosphorothioate linkage
aattcaacatcgaatagatga

SEQ ID NO: 679 - RNA, 21 nt, synthetic construct
  source 1..21: mol_type = other RNA
  modified_base 1..6: mod_base = OTHER; note = 2'-O-Methyl ribonucleotide
  modified_base 7: mod_base = OTHER; note = 2'-fluoro ribonucleotide
  modified_base 8: mod_base = OTHER; note = 2'-O-Methyl ribonucleotide
  modified_base 9: mod_base = OTHER; note = 2'-fluoro ribonucleotide
  modified_base 10: mod_base = OTHER; note = 2'-O-Methyl ribonucleotide
  modified_base 11: mod_base = OTHER; note = 2'-fluoro ribonucleotide
  modified_base 12..21: mod_base = OTHER; note = 2'-O-Methyl ribonucleotide
  modified_base 1..3: mod_base = OTHER; note = phosphorothioate linkage
tcaacatcgaatagatggata

SEQ ID NO: 680 - RNA, 21 nt, synthetic construct
  source 1..21: mol_type = other RNA
  modified_base 1..6: mod_base = OTHER; note = 2'-O-Methyl ribonucleotide
  modified_base 7: mod_base = OTHER; note = 2'-fluoro ribonucleotide
  modified_base 8: mod_base = OTHER; note = 2'-O-Methyl ribonucleotide
  modified_base 9: mod_base = OTHER; note = 2'-fluoro ribonucleotide
  modified_base 10: mod_base = OTHER; note = 2'-O-Methyl ribonucleotide
  modified_base 11: mod_base = OTHER; note = 2'-fluoro ribonucleotide
  modified_base 12..21: mod_base = OTHER; note = 2'-O-Methyl ribonucleotide
  modified_base 1..3: mod_base = OTHER; note = phosphorothioate linkage
caacatcgaatagatggatca

SEQ ID NO: 681 - RNA, 21 nt, synthetic construct
  source 1..21: mol_type = other RNA
  modified_base 1..6: mod_base = OTHER; note = 2'-O-Methyl ribonucleotide
  modified_base 7: mod_base = OTHER; note = 2'-fluoro ribonucleotide
  modified_base 8: mod_base = OTHER; note = 2'-O-Methyl ribonucleotide
  modified_base 9: mod_base = OTHER; note = 2'-fluoro ribonucleotide
  modified_base 10: mod_base = OTHER; note = 2'-O-Methyl ribonucleotide
  modified_base 11: mod_base = OTHER; note = 2'-fluoro ribonucleotide
  modified_base 12..21: mod_base = OTHER; note = 2'-O-Methyl ribonucleotide
  modified_base 1..3: mod_base = OTHER; note = phosphorothioate linkage
aacatcgaatagatggatcaa

SEQ ID NO: 682 - RNA, 21 nt, synthetic construct
  source 1..21: mol_type = other RNA
  modified_base 1..6: mod_base = OTHER; note = 2'-O-Methyl ribonucleotide
  modified_base 7: mod_base = OTHER; note = 2'-fluoro ribonucleotide
  modified_base 8: mod_base = OTHER; note = 2'-O-Methyl ribonucleotide
  modified_base 9: mod_base = OTHER; note = 2'-fluoro ribonucleotide
  modified_base 10: mod_base = OTHER; note = 2'-O-Methyl ribonucleotide
  modified_base 11: mod_base = OTHER; note = 2'-fluoro ribonucleotide
  modified_base 12..21: mod_base = OTHER; note = 2'-O-Methyl ribonucleotide
  modified_base 1..3: mod_base = OTHER; note = phosphorothioate linkage
acatcgaatagatggatcaca

SEQ ID NO: 683 - RNA, 21 nt, synthetic construct
  source 1..21: mol_type = other RNA
  modified_base 1..6: mod_base = OTHER; note = 2'-O-Methyl ribonucleotide
  modified_base 7: mod_base = OTHER; note = 2'-fluoro ribonucleotide
  modified_base 8: mod_base = OTHER; note = 2'-O-Methyl ribonucleotide
  modified_base 9: mod_base = OTHER; note = 2'-fluoro ribonucleotide
  modified_base 10: mod_base = OTHER; note = 2'-O-Methyl ribonucleotide
  modified_base 11: mod_base = OTHER; note = 2'-fluoro ribonucleotide
  modified_base 12..21: mod_base = OTHER; note = 2'-O-Methyl ribonucleotide
  modified_base 1..3: mod_base = OTHER; note = phosphorothioate linkage
tcgaatagatggatcacaaaa

SEQ ID NO: 684 - RNA, 21 nt, synthetic construct
  source 1..21: mol_type = other RNA
  modified_base 1..6: mod_base = OTHER; note = 2'-O-Methyl ribonucleotide
  modified_base 7: mod_base = OTHER; note = 2'-fluoro ribonucleotide
  modified_base 8: mod_base = OTHER; note = 2'-O-Methyl ribonucleotide
  modified_base 9: mod_base = OTHER; note = 2'-fluoro ribonucleotide
  modified_base 10: mod_base = OTHER; note = 2'-O-Methyl ribonucleotide
  modified_base 11: mod_base = OTHER; note = 2'-fluoro ribonucleotide
  modified_base 12..21: mod_base = OTHER; note = 2'-O-Methyl ribonucleotide
  modified_base 1..3: mod_base = OTHER; note = phosphorothioate linkage
atagatggatcacaaaactta

SEQ ID NO: 685 - RNA, 21 nt, synthetic construct
  source 1..21: mol_type = other RNA
  modified_base 1..6: mod_base = OTHER; note = 2'-O-Methyl ribonucleotide
  modified_base 7: mod_base = OTHER; note = 2'-fluoro ribonucleotide
  modified_base 8: mod_base = OTHER; note = 2'-O-Methyl ribonucleotide
  modified_base 9: mod_base = OTHER; note = 2'-fluoro ribonucleotide
  modified_base 10: mod_base = OTHER; note = 2'-O-Methyl ribonucleotide
  modified_base 11: mod_base = OTHER; note = 2'-fluoro ribonucleotide
  modified_base 12..21: mod_base = OTHER; note = 2'-O-Methyl ribonucleotide
  modified_base 1..3: mod_base = OTHER; note = phosphorothioate linkage
gatggatcacaaaacttcaaa

SEQ ID NO: 686 - RNA, 21 nt, synthetic construct
  source 1..21: mol_type = other RNA
  modified_base 1..6: mod_base = OTHER; note = 2'-O-Methyl ribonucleotide
  modified_base 7: mod_base = OTHER; note = 2'-fluoro ribonucleotide
  modified_base 8: mod_base = OTHER; note = 2'-O-Methyl ribonucleotide
  modified_base 9: mod_base = OTHER; note = 2'-fluoro ribonucleotide
  modified_base 10: mod_base = OTHER; note = 2'-O-Methyl ribonucleotide
  modified_base 11: mod_base = OTHER; note = 2'-fluoro ribonucleotide
  modified_base 12..21: mod_base = OTHER; note = 2'-O-Methyl ribonucleotide
  modified_base 1..3: mod_base = OTHER; note = phosphorothioate linkage
acaaaacttcaatgaaacgta

SEQ ID NO: 687 - RNA, 21 nt, synthetic construct
  source 1..21: mol_type = other RNA
  modified_base 1..6: mod_base = OTHER; note = 2'-O-Methyl ribonucleotide
  modified_base 7: mod_base = OTHER; note = 2'-fluoro ribonucleotide
  modified_base 8: mod_base = OTHER; note = 2'-O-Methyl ribonucleotide
  modified_base 9: mod_base = OTHER; note = 2'-fluoro ribonucleotide
  modified_base 10: mod_base = OTHER; note = 2'-O-Methyl ribonucleotide
  modified_base 11: mod_base = OTHER; note = 2'-fluoro ribonucleotide
  modified_base 12..21: mod_base = OTHER; note = 2'-O-Methyl ribonucleotide
  modified_base 1..3: mod_base = OTHER; note = phosphorothioate linkage
aaaacttcaatgaaacgtgga

SEQ ID NO: 688 - RNA, 21 nt, synthetic construct
  source 1..21: mol_type = other RNA
  modified_base 1..6: mod_base = OTHER; note = 2'-O-Methyl ribonucleotide
  modified_base 7: mod_base = OTHER; note = 2'-fluoro ribonucleotide
  modified_base 8: mod_base = OTHER; note = 2'-O-Methyl ribonucleotide
  modified_base 9: mod_base = OTHER; note = 2'-fluoro ribonucleotide
  modified_base 10: mod_base = OTHER; note = 2'-O-Methyl ribonucleotide
  modified_base 11: mod_base = OTHER; note = 2'-fluoro ribonucleotide
  modified_base 12..21: mod_base = OTHER; note = 2'-O-Methyl ribonucleotide
  modified_base 1..3: mod_base = OTHER; note = phosphorothioate linkage
aaacttcaatgaaacgtggga

SEQ ID NO: 689 - RNA, 21 nt, synthetic construct
  source 1..21: mol_type = other RNA
  modified_base 1..6: mod_base = OTHER; note = 2'-O-Methyl ribonucleotide
  modified_base 7: mod_base = OTHER; note = 2'-fluoro ribonucleotide
  modified_base 8: mod_base = OTHER; note = 2'-O-Methyl ribonucleotide
  modified_base 9: mod_base = OTHER; note = 2'-fluoro ribonucleotide
  modified_base 10: mod_base = OTHER; note = 2'-O-Methyl ribonucleotide
  modified_base 11: mod_base = OTHER; note = 2'-fluoro ribonucleotide
  modified_base 12..21: mod_base = OTHER; note = 2'-O-Methyl ribonucleotide
  modified_base 1..3: mod_base = OTHER; note = phosphorothioate linkage
cttcaatgaaacgtgggagaa

SEQ ID NO: 690 - RNA, 21 nt, synthetic construct
  source 1..21: mol_type = other RNA
  modified_base 1..6: mod_base = OTHER; note = 2'-O-Methyl ribonucleotide
  modified_base 7: mod_base = OTHER; note = 2'-fluoro ribonucleotide
  modified_base 8: mod_base = OTHER; note = 2'-O-Methyl ribonucleotide
  modified_base 9: mod_base = OTHER; note = 2'-fluoro ribonucleotide
  modified_base 10: mod_base = OTHER; note = 2'-O-Methyl ribonucleotide
  modified_base 11: mod_base = OTHER; note = 2'-fluoro ribonucleotide
  modified_base 12..21: mod_base = OTHER; note = 2'-O-Methyl ribonucleotide
  modified_base 1..3: mod_base = OTHER; note = phosphorothioate linkage
ttcaatgaaacgtgggagaaa

SEQ ID NO: 691 - RNA, 21 nt, synthetic construct
  source 1..21: mol_type = other RNA
  modified_base 1..6: mod_base = OTHER; note = 2'-O-Methyl ribonucleotide
  modified_base 7: mod_base = OTHER; note = 2'-fluoro ribonucleotide
  modified_base 8: mod_base = OTHER; note = 2'-O-Methyl ribonucleotide
  modified_base 9: mod_base = OTHER; note = 2'-fluoro ribonucleotide
  modified_base 10: mod_base = OTHER; note = 2'-O-Methyl ribonucleotide
  modified_base 11: mod_base = OTHER; note = 2'-fluoro ribonucleotide
  modified_base 12..21: mod_base = OTHER; note = 2'-O-Methyl ribonucleotide
  modified_base 1..3: mod_base = OTHER; note = phosphorothioate linkage
tcaatgaaacgtgggagaaca

SEQ ID NO: 692 - RNA, 21 nt, synthetic construct
  source 1..21: mol_type = other RNA
  modified_base 1..6: mod_base = OTHER; note = 2'-O-Methyl ribonucleotide
  modified_base 7: mod_base = OTHER; note = 2'-fluoro ribonucleotide
  modified_base 8: mod_base = OTHER; note = 2'-O-Methyl ribonucleotide
  modified_base 9: mod_base = OTHER; note = 2'-fluoro ribonucleotide
  modified_base 10: mod_base = OTHER; note = 2'-O-Methyl ribonucleotide
  modified_base 11: mod_base = OTHER; note = 2'-fluoro ribonucleotide
  modified_base 12..21: mod_base = OTHER; note = 2'-O-Methyl ribonucleotide
  modified_base 1..3: mod_base = OTHER; note = phosphorothioate linkage
aatgaaacgtgggagaactaa

SEQ ID NO: 693 - RNA, 21 nt, synthetic construct
  source 1..21: mol_type = other RNA
  modified_base 1..6: mod_base = OTHER; note = 2'-O-Methyl ribonucleotide
  modified_base 7: mod_base = OTHER; note = 2'-fluoro ribonucleotide
  modified_base 8: mod_base = OTHER; note = 2'-O-Methyl ribonucleotide
  modified_base 9: mod_base = OTHER; note = 2'-fluoro ribonucleotide
  modified_base 10: mod_base = OTHER; note = 2'-O-Methyl ribonucleotide
  modified_base 11: mod_base = OTHER; note = 2'-fluoro ribonucleotide
  modified_base 12..21: mod_base = OTHER; note = 2'-O-Methyl ribonucleotide
  modified_base 1..3: mod_base = OTHER; note = phosphorothioate linkage
atgaaacgtgggagaactaca

SEQ ID NO: 694 - RNA, 21 nt, synthetic construct
  source 1..21: mol_type = other RNA
  modified_base 1..6: mod_base = OTHER; note = 2'-O-Methyl ribonucleotide
  modified_base 7: mod_base = OTHER; note = 2'-fluoro ribonucleotide
  modified_base 8: mod_base = OTHER; note = 2'-O-Methyl ribonucleotide
  modified_base 9: mod_base = OTHER; note = 2'-fluoro ribonucleotide
  modified_base 10: mod_base = OTHER; note = 2'-O-Methyl ribonucleotide
  modified_base 11: mod_base = OTHER; note = 2'-fluoro ribonucleotide
  modified_base 12..21: mod_base = OTHER; note = 2'-O-Methyl ribonucleotide
  modified_base 1..3: mod_base = OTHER; note = phosphorothioate linkage
gaaacgtgggagaactacaaa

SEQ ID NO: 695 - RNA, 21 nt, synthetic construct
  source 1..21: mol_type = other RNA
  modified_base 1..6: mod_base = OTHER; note = 2'-O-Methyl ribonucleotide
  modified_base 7: mod_base = OTHER; note = 2'-fluoro ribonucleotide
  modified_base 8: mod_base = OTHER; note = 2'-O-Methyl ribonucleotide
  modified_base 9: mod_base = OTHER; note = 2'-fluoro ribonucleotide
  modified_base 10: mod_base = OTHER; note = 2'-O-Methyl ribonucleotide
  modified_base 11: mod_base = OTHER; note = 2'-fluoro ribonucleotide
  modified_base 12..21: mod_base = OTHER; note = 2'-O-Methyl ribonucleotide
  modified_base 1..3: mod_base = OTHER; note = phosphorothioate linkage
aaacgtgggagaactacaaaa

SEQ ID NO: 696 - RNA, 21 nt, synthetic construct
  source 1..21: mol_type = other RNA
  modified_base 1..6: mod_base = OTHER; note = 2'-O-Methyl ribonucleotide
  modified_base 7: mod_base = OTHER; note = 2'-fluoro ribonucleotide
  modified_base 8: mod_base = OTHER; note = 2'-O-Methyl ribonucleotide
  modified_base 9: mod_base = OTHER; note = 2'-fluoro ribonucleotide
  modified_base 10: mod_base = OTHER; note = 2'-O-Methyl ribonucleotide
  modified_base 11: mod_base = OTHER; note = 2'-fluoro ribonucleotide
  modified_base 12..21: mod_base = OTHER; note = 2'-O-Methyl ribonucleotide
  modified_base 1..3: mod_base = OTHER; note = phosphorothioate linkage
tgggagaactacaaatatgga

SEQ ID NO: 697 - RNA, 21 nt, synthetic construct
  source 1..21: mol_type = other RNA
  modified_base 1..6: mod_base = OTHER; note = 2'-O-Methyl ribonucleotide
  modified_base 7: mod_base = OTHER; note = 2'-fluoro ribonucleotide
  modified_base 8: mod_base = OTHER; note = 2'-O-Methyl ribonucleotide
  modified_base 9: mod_base = OTHER; note = 2'-fluoro ribonucleotide
  modified_base 10: mod_base = OTHER; note = 2'-O-Methyl ribonucleotide
  modified_base 11: mod_base = OTHER; note = 2'-fluoro ribonucleotide
  modified_base 12..21: mod_base = OTHER; note = 2'-O-Methyl ribonucleotide
  modified_base 1..3: mod_base = OTHER; note = phosphorothioate linkage
tgggaggcttgatggagaata

SEQ ID NO: 698 - RNA, 21 nt, synthetic construct
  source 1..21: mol_type = other RNA
  modified_base 1..6: mod_base = OTHER; note = 2'-O-Methyl ribonucleotide
  modified_base 7: mod_base = OTHER; note = 2'-fluoro ribonucleotide
  modified_base 8: mod_base = OTHER; note = 2'-O-Methyl ribonucleotide
  modified_base 9: mod_base = OTHER; note = 2'-fluoro ribonucleotide
  modified_base 10: mod_base = OTHER; note = 2'-O-Methyl ribonucleotide
  modified_base 11: mod_base = OTHER; note = 2'-fluoro ribonucleotide
  modified_base 12..21: mod_base = OTHER; note = 2'-O-Methyl ribonucleotide
  modified_base 1..3: mod_base = OTHER; note = phosphorothioate linkage
gggaggcttgatggagaatta

SEQ ID NO: 699 - RNA, 21 nt, synthetic construct
  source 1..21: mol_type = other RNA
  modified_base 1..6: mod_base = OTHER; note = 2'-O-Methyl ribonucleotide
  modified_base 7: mod_base = OTHER; note = 2'-fluoro ribonucleotide
  modified_base 8: mod_base = OTHER; note = 2'-O-Methyl ribonucleotide
  modified_base 9: mod_base = OTHER; note = 2'-fluoro ribonucleotide
  modified_base 10: mod_base = OTHER; note = 2'-O-Methyl ribonucleotide
  modified_base 11: mod_base = OTHER; note = 2'-fluoro ribonucleotide
  modified_base 12..21: mod_base = OTHER; note = 2'-O-Methyl ribonucleotide
  modified_base 1..3: mod_base = OTHER; note = phosphorothioate linkage
gggcctagagaagatatacta

SEQ ID NO: 700 - RNA, 21 nt, synthetic construct
  source 1..21: mol_type = other RNA
  modified_base 1..6: mod_base = OTHER; note = 2'-O-Methyl ribonucleotide
  modified_base 7: mod_base = OTHER; note = 2'-fluoro ribonucleotide
  modified_base 8: mod_base = OTHER; note = 2'-O-Methyl ribonucleotide
  modified_base 9: mod_base = OTHER; note = 2'-fluoro ribonucleotide
  modified_base 10: mod_base = OTHER; note = 2'-O-Methyl ribonucleotide
  modified_base 11: mod_base = OTHER; note = 2'-fluoro ribonucleotide
  modified_base 12..21: mod_base = OTHER; note = 2'-O-Methyl ribonucleotide
  modified_base 1..3: mod_base = OTHER; note = phosphorothioate linkage
gcctagagaagatatactcca

SEQ ID NO: 701 - RNA, 21 nt, synthetic construct
  source 1..21: mol_type = other RNA
  modified_base 1..6: mod_base = OTHER; note = 2'-O-Methyl ribonucleotide
  modified_base 7: mod_base = OTHER; note = 2'-fluoro ribonucleotide
  modified_base 8: mod_base = OTHER; note = 2'-O-Methyl ribonucleotide
  modified_base 9: mod_base = OTHER; note = 2'-fluoro ribonucleotide
  modified_base 10: mod_base = OTHER; note = 2'-O-Methyl ribonucleotide
  modified_base 11: mod_base = OTHER; note = 2'-fluoro ribonucleotide
  modified_base 12..21: mod_base = OTHER; note = 2'-O-Methyl ribonucleotide
  modified_base 1..3: mod_base = OTHER; note = phosphorothioate linkage
agagaagatatactccataga

SEQ ID NO: 702 - RNA, 21 nt, synthetic construct
  source 1..21: mol_type = other RNA
  modified_base 1..6: mod_base = OTHER; note = 2'-O-Methyl ribonucleotide
  modified_base 7: mod_base = OTHER; note = 2'-fluoro ribonucleotide
  modified_base 8: mod_base = OTHER; note = 2'-O-Methyl ribonucleotide
  modified_base 9: mod_base = OTHER; note = 2'-fluoro ribonucleotide
  modified_base 10: mod_base = OTHER; note = 2'-O-Methyl ribonucleotide
  modified_base 11: mod_base = OTHER; note = 2'-fluoro ribonucleotide
  modified_base 12..21: mod_base = OTHER; note = 2'-O-Methyl ribonucleotide
  modified_base 1..3: mod_base = OTHER; note = phosphorothioate linkage
gagaagatatactccatagta

SEQ ID NO: 703 - RNA, 21 nt, synthetic construct
  source 1..21: mol_type = other RNA
  modified_base 1..6: mod_base = OTHER; note = 2'-O-Methyl ribonucleotide
  modified_base 7: mod_base = OTHER; note = 2'-fluoro ribonucleotide
  modified_base 8: mod_base = OTHER; note = 2'-O-Methyl ribonucleotide
  modified_base 9: mod_base = OTHER; note = 2'-fluoro ribonucleotide
  modified_base 10: mod_base = OTHER; note = 2'-O-Methyl ribonucleotide
  modified_base 11: mod_base = OTHER; note = 2'-fluoro ribonucleotide
  modified_base 12..21: mod_base = OTHER; note = 2'-O-Methyl ribonucleotide
  modified_base 1..3: mod_base = OTHER; note = phosphorothioate linkage
agaagatatactccatagtga

SEQ ID NO: 704 - RNA, 21 nt, synthetic construct
  source 1..21: mol_type = other RNA
  modified_base 1..6: mod_base = OTHER; note = 2'-O-Methyl ribonucleotide
  modified_base 7: mod_base = OTHER; note = 2'-fluoro ribonucleotide
  modified_base 8: mod_base = OTHER; note = 2'-O-Methyl ribonucleotide
  modified_base 9: mod_base = OTHER; note = 2'-fluoro ribonucleotide
  modified_base 10: mod_base = OTHER; note = 2'-O-Methyl ribonucleotide
  modified_base 11: mod_base = OTHER; note = 2'-fluoro ribonucleotide
  modified_base 12..21: mod_base = OTHER; note = 2'-O-Methyl ribonucleotide
  modified_base 1..3: mod_base = OTHER; note = phosphorothioate linkage
gaagatatactccatagtgaa

SEQ ID NO: 705 - RNA, 21 nt, synthetic construct
  source 1..21: mol_type = other RNA
  modified_base 1..6: mod_base = OTHER; note = 2'-O-Methyl ribonucleotide
  modified_base 7: mod_base = OTHER; note = 2'-fluoro ribonucleotide
  modified_base 8: mod_base = OTHER; note = 2'-O-Methyl ribonucleotide
  modified_base 9: mod_base = OTHER; note = 2'-fluoro ribonucleotide
  modified_base 10: mod_base = OTHER; note = 2'-O-Methyl ribonucleotide
  modified_base 11: mod_base = OTHER; note = 2'-fluoro ribonucleotide
  modified_base 12..21: mod_base = OTHER; note = 2'-O-Methyl ribonucleotide
  modified_base 1..3: mod_base = OTHER; note = phosphorothioate linkage
aagatatactccatagtgaaa

SEQ ID NO: 706 - RNA, 21 nt, synthetic construct
  source 1..21: mol_type = other RNA
  modified_base 1..6: mod_base = OTHER; note = 2'-O-Methyl ribonucleotide
  modified_base 7: mod_base = OTHER; note = 2'-fluoro ribonucleotide
  modified_base 8: mod_base = OTHER; note = 2'-O-Methyl ribonucleotide
  modified_base 9: mod_base = OTHER; note = 2'-fluoro ribonucleotide
  modified_base 10: mod_base = OTHER; note = 2'-O-Methyl ribonucleotide
  modified_base 11: mod_base = OTHER; note = 2'-fluoro ribonucleotide
  modified_base 12..21: mod_base = OTHER; note = 2'-O-Methyl ribonucleotide
  modified_base 1..3: mod_base = OTHER; note = phosphorothioate linkage
tatactccatagtgaagcaaa

SEQ ID NO: 707 - RNA, 21 nt, synthetic construct
  source 1..21: mol_type = other RNA
  modified_base 1..6: mod_base = OTHER; note = 2'-O-Methyl ribonucleotide
  modified_base 7: mod_base = OTHER; note = 2'-fluoro ribonucleotide
  modified_base 8: mod_base = OTHER; note = 2'-O-Methyl ribonucleotide
  modified_base 9: mod_base = OTHER; note = 2'-fluoro ribonucleotide
  modified_base 10: mod_base = OTHER; note = 2'-O-Methyl ribonucleotide
  modified_base 11: mod_base = OTHER; note = 2'-fluoro ribonucleotide
  modified_base 12..21: mod_base = OTHER; note = 2'-O-Methyl ribonucleotide
  modified_base 1..3: mod_base = OTHER; note = phosphorothioate linkage
atactccatagtgaagcaata

SEQ ID NO: 708 - RNA, 21 nt, synthetic construct
  source 1..21: mol_type = other RNA
  modified_base 1..6: mod_base = OTHER; note = 2'-O-Methyl ribonucleotide
  modified_base 7: mod_base = OTHER; note = 2'-fluoro ribonucleotide
  modified_base 8: mod_base = OTHER; note = 2'-O-Methyl ribonucleotide
  modified_base 9: mod_base = OTHER; note = 2'-fluoro ribonucleotide
  modified_base 10: mod_base = OTHER; note = 2'-O-Methyl ribonucleotide
  modified_base 11: mod_base = OTHER; note = 2'-fluoro ribonucleotide
  modified_base 12..21: mod_base = OTHER; note = 2'-O-Methyl ribonucleotide
  modified_base 1..3: mod_base = OTHER; note = phosphorothioate linkage
ccatagtgaagcaatctaata

SEQ ID NO: 709 - RNA, 21 nt, synthetic construct
  source 1..21: mol_type = other RNA
  modified_base 1..6: mod_base = OTHER; note = 2'-O-Methyl ribonucleotide
  modified_base 7: mod_base = OTHER; note = 2'-fluoro ribonucleotide
  modified_base 8: mod_base = OTHER; note = 2'-O-Methyl ribonucleotide
  modified_base 9: mod_base = OTHER; note = 2'-fluoro ribonucleotide
  modified_base 10: mod_base = OTHER; note = 2'-O-Methyl ribonucleotide
  modified_base 11: mod_base = OTHER; note = 2'-fluoro ribonucleotide
  modified_base 12..21: mod_base = OTHER; note = 2'-O-Methyl ribonucleotide
  modified_base 1..3: mod_base = OTHER; note = phosphorothioate linkage
atagtgaagcaatctaattaa

SEQ ID NO: 710 - RNA, 21 nt, synthetic construct
  source 1..21: mol_type = other RNA
  modified_base 1..6: mod_base = OTHER; note = 2'-O-Methyl ribonucleotide
  modified_base 7: mod_base = OTHER; note = 2'-fluoro ribonucleotide
  modified_base 8: mod_base = OTHER; note = 2'-O-Methyl ribonucleotide
  modified_base 9: mod_base = OTHER; note = 2'-fluoro ribonucleotide
  modified_base 10: mod_base = OTHER; note = 2'-O-Methyl ribonucleotide
  modified_base 11: mod_base = OTHER; note = 2'-fluoro ribonucleotide
  modified_base 12..21: mod_base = OTHER; note = 2'-O-Methyl ribonucleotide
  modified_base 1..3: mod_base = OTHER; note = phosphorothioate linkage
ttttacttgggaaatcacgaa

SEQ ID NO: 711 - RNA, 21 nt, synthetic construct
  source 1..21: mol_type = other RNA
  modified_base 1..6: mod_base = OTHER; note = 2'-O-Methyl ribonucleotide
  modified_base 7: mod_base = OTHER; note = 2'-fluoro ribonucleotide
  modified_base 8: mod_base = OTHER; note = 2'-O-Methyl ribonucleotide
  modified_base 9: mod_base = OTHER; note = 2'-fluoro ribonucleotide
  modified_base 10: mod_base = OTHER; note = 2'-O-Methyl ribonucleotide
  modified_base 11: mod_base = OTHER; note = 2'-fluoro ribonucleotide
  modified_base 12..21: mod_base = OTHER; note = 2'-O-Methyl ribonucleotide
  modified_base 1..3: mod_base = OTHER; note = phosphorothioate linkage
ttgggaaatcacgaaaccaaa

SEQ ID NO: 712 - RNA, 21 nt, synthetic construct
  source 1..21: mol_type = other RNA
  modified_base 1..6: mod_base = OTHER; note = 2'-O-Methyl ribonucleotide
  modified_base 7: mod_base = OTHER; note = 2'-fluoro ribonucleotide
  modified_base 8: mod_base = OTHER; note = 2'-O-Methyl ribonucleotide
  modified_base 9: mod_base = OTHER; note = 2'-fluoro ribonucleotide
  modified_base 10: mod_base = OTHER; note = 2'-O-Methyl ribonucleotide
  modified_base 11: mod_base = OTHER; note = 2'-fluoro ribonucleotide
  modified_base 12..21: mod_base = OTHER; note = 2'-O-Methyl ribonucleotide
  modified_base 1..3: mod_base = OTHER; note = phosphorothioate linkage
gggaaatcacgaaaccaacta

SEQ ID NO: 713 - RNA, 21 nt, synthetic construct
  source 1..21: mol_type = other RNA
  modified_base 1..6: mod_base = OTHER; note = 2'-O-Methyl ribonucleotide
  modified_base 7: mod_base = OTHER; note = 2'-fluoro ribonucleotide
  modified_base 8: mod_base = OTHER; note = 2'-O-Methyl ribonucleotide
  modified_base 9: mod_base = OTHER; note = 2'-fluoro ribonucleotide
  modified_base 10: mod_base = OTHER; note = 2'-O-Methyl ribonucleotide
  modified_base 11: mod_base = OTHER; note = 2'-fluoro ribonucleotide
  modified_base 12..21: mod_base = OTHER; note = 2'-O-Methyl ribonucleotide
  modified_base 1..3: mod_base = OTHER; note = phosphorothioate linkage
ggaaatcacgaaaccaactaa

SEQ ID NO: 714 - RNA, 21 nt, synthetic construct
  source 1..21: mol_type = other RNA
  modified_base 1..6: mod_base = OTHER; note = 2'-O-Methyl ribonucleotide
  modified_base 7: mod_base = OTHER; note = 2'-fluoro ribonucleotide
  modified_base 8: mod_base = OTHER; note = 2'-O-Methyl ribonucleotide
  modified_base 9: mod_base = OTHER; note = 2'-fluoro ribonucleotide
  modified_base 10: mod_base = OTHER; note = 2'-O-Methyl ribonucleotide
  modified_base 11: mod_base = OTHER; note = 2'-fluoro ribonucleotide
  modified_base 12..21: mod_base = OTHER; note = 2'-O-Methyl ribonucleotide
  modified_base 1..3: mod_base = OTHER; note = phosphorothioate linkage
aaatcacgaaaccaactataa

SEQ ID NO: 715 - RNA, 21 nt, synthetic construct
  source 1..21: mol_type = other RNA
  modified_base 1..6: mod_base = OTHER; note = 2'-O-Methyl ribonucleotide
  modified_base 7: mod_base = OTHER; note = 2'-fluoro ribonucleotide
  modified_base 8: mod_base = OTHER; note = 2'-O-Methyl ribonucleotide
  modified_base 9: mod_base = OTHER; note = 2'-fluoro ribonucleotide
  modified_base 10: mod_base = OTHER; note = 2'-O-Methyl ribonucleotide
  modified_base 11: mod_base = OTHER; note = 2'-fluoro ribonucleotide
  modified_base 12..21: mod_base = OTHER; note = 2'-O-Methyl ribonucleotide
  modified_base 1..3: mod_base = OTHER; note = phosphorothioate linkage
aatcacgaaaccaactataca

SEQ ID NO: 716 - RNA, 21 nt, synthetic construct
  source 1..21: mol_type = other RNA
  modified_base 1..6: mod_base = OTHER; note = 2'-O-Methyl ribonucleotide
  modified_base 7: mod_base = OTHER; note = 2'-fluoro ribonucleotide
  modified_base 8: mod_base = OTHER; note = 2'-O-Methyl ribonucleotide
  modified_base 9: mod_base = OTHER; note = 2'-fluoro ribonucleotide
  modified_base 10: mod_base = OTHER; note = 2'-O-Methyl ribonucleotide
  modified_base 11: mod_base = OTHER; note = 2'-fluoro ribonucleotide
  modified_base 12..21: mod_base = OTHER; note = 2'-O-Methyl ribonucleotide
  modified_base 1..3: mod_base = OTHER; note = phosphorothioate linkage
atcacgaaaccaactatacga

SEQ ID NO: 717 - RNA, 21 nt, synthetic construct
  source 1..21: mol_type = other RNA
  modified_base 1..6: mod_base = OTHER; note = 2'-O-Methyl ribonucleotide
  modified_base 7: mod_base = OTHER; note = 2'-fluoro ribonucleotide
  modified_base 8: mod_base = OTHER; note = 2'-O-Methyl ribonucleotide
  modified_base 9: mod_base = OTHER; note = 2'-fluoro ribonucleotide
  modified_base 10: mod_base = OTHER; note = 2'-O-Methyl ribonucleotide
  modified_base 11: mod_base = OTHER; note = 2'-fluoro ribonucleotide
  modified_base 12..21: mod_base = OTHER; note = 2'-O-Methyl ribonucleotide
  modified_base 1..3: mod_base = OTHER; note = phosphorothioate linkage
tcacgaaaccaactatacgca

SEQ ID NO: 718 - RNA, 21 nt, synthetic construct
  source 1..21: mol_type = other RNA
  modified_base 1..6: mod_base = OTHER; note = 2'-O-Methyl ribonucleotide
  modified_base 7: mod_base = OTHER; note = 2'-fluoro ribonucleotide
  modified_base 8: mod_base = OTHER; note = 2'-O-Methyl ribonucleotide
  modified_base 9: mod_base = OTHER; note = 2'-fluoro ribonucleotide
  modified_base 10: mod_base = OTHER; note = 2'-O-Methyl ribonucleotide
  modified_base 11: mod_base = OTHER; note = 2'-fluoro ribonucleotide
  modified_base 12..21: mod_base = OTHER; note = 2'-O-Methyl ribonucleotide
  modified_base 1..3: mod_base = OTHER; note = phosphorothioate linkage
cacgaaaccaactatacgcta

SEQ ID NO: 719 - RNA, 21 nt, synthetic construct
  source 1..21: mol_type = other RNA
  modified_base 1..6: mod_base = OTHER; note = 2'-O-Methyl ribonucleotide
  modified_base 7: mod_base = OTHER; note = 2'-fluoro ribonucleotide
  modified_base 8: mod_base = OTHER; note = 2'-O-Methyl ribonucleotide
  modified_base 9: mod_base = OTHER; note = 2'-fluoro ribonucleotide
  modified_base 10: mod_base = OTHER; note = 2'-O-Methyl ribonucleotide
  modified_base 11: mod_base = OTHER; note = 2'-fluoro ribonucleotide
  modified_base 12..21: mod_base = OTHER; note = 2'-O-Methyl ribonucleotide
  modified_base 1..3: mod_base = OTHER; note = phosphorothioate linkage
gaaaccaactatacgctacaa

SEQ ID NO: 720 - RNA, 21 nt, synthetic construct
  source 1..21: mol_type = other RNA
  modified_base 1..6: mod_base = OTHER; note = 2'-O-Methyl ribonucleotide
  modified_base 7: mod_base = OTHER; note = 2'-fluoro ribonucleotide
  modified_base 8: mod_base = OTHER; note = 2'-O-Methyl ribonucleotide
  modified_base 9: mod_base = OTHER; note = 2'-fluoro ribonucleotide
  modified_base 10: mod_base = OTHER; note = 2'-O-Methyl ribonucleotide
  modified_base 11: mod_base = OTHER; note = 2'-fluoro ribonucleotide
  modified_base 12..21: mod_base = OTHER; note = 2'-O-Methyl ribonucleotide
  modified_base 1..3: mod_base = OTHER; note = phosphorothioate linkage
tgcgattactggcaatgtcca

SEQ ID NO: 721 - RNA, 21 nt, synthetic construct
  source 1..21: mol_type = other RNA
  modified_base 1..6: mod_base = OTHER; note = 2'-O-Methyl ribonucleotide
  modified_base 7: mod_base = OTHER; note = 2'-fluoro ribonucleotide
  modified_base 8: mod_base = OTHER; note = 2'-O-Methyl ribonucleotide
  modified_base 9: mod_base = OTHER; note = 2'-fluoro ribonucleotide
  modified_base 10: mod_base = OTHER; note = 2'-O-Methyl ribonucleotide
  modified_base 11: mod_base = OTHER; note = 2'-fluoro ribonucleotide
  modified_base 12..21: mod_base = OTHER; note = 2'-O-Methyl ribonucleotide
  modified_base 1..3: mod_base = OTHER; note = phosphorothioate linkage
gcgattactggcaatgtccca

SEQ ID NO: 722 - RNA, 21 nt, synthetic construct
  source 1..21: mol_type = other RNA
  modified_base 1..6: mod_base = OTHER; note = 2'-O-Methyl ribonucleotide
  modified_base 7: mod_base = OTHER; note = 2'-fluoro ribonucleotide
  modified_base 8: mod_base = OTHER; note = 2'-O-Methyl ribonucleotide
  modified_base 9: mod_base = OTHER; note = 2'-fluoro ribonucleotide
  modified_base 10: mod_base = OTHER; note = 2'-O-Methyl ribonucleotide
  modified_base 11: mod_base = OTHER; note = 2'-fluoro ribonucleotide
  modified_base 12..21: mod_base = OTHER; note = 2'-O-Methyl ribonucleotide
  modified_base 1..3: mod_base = OTHER; note = phosphorothioate linkage
cgattactggcaatgtcccca

SEQ ID NO: 723 - RNA, 21 nt, synthetic construct
  source 1..21: mol_type = other RNA
  modified_base 1..6: mod_base = OTHER; note = 2'-O-Methyl ribonucleotide
  modified_base 7: mod_base = OTHER; note = 2'-fluoro ribonucleotide
  modified_base 8: mod_base = OTHER; note = 2'-O-Methyl ribonucleotide
  modified_base 9: mod_base = OTHER; note = 2'-fluoro ribonucleotide
  modified_base 10: mod_base = OTHER; note = 2'-O-Methyl ribonucleotide
  modified_base 11: mod_base = OTHER; note = 2'-fluoro ribonucleotide
  modified_base 12..21: mod_base = OTHER; note = 2'-O-Methyl ribonucleotide
  modified_base 1..3: mod_base = OTHER; note = phosphorothioate linkage
gattactggcaatgtccccaa

SEQ ID NO: 724 - RNA, 21 nt, synthetic construct
  source 1..21: mol_type = other RNA
  modified_base 1..6: mod_base = OTHER; note = 2'-O-Methyl ribonucleotide
  modified_base 7: mod_base = OTHER; note = 2'-fluoro ribonucleotide
  modified_base 8: mod_base = OTHER; note = 2'-O-Methyl ribonucleotide
  modified_base 9: mod_base = OTHER; note = 2'-fluoro ribonucleotide
  modified_base 10: mod_base = OTHER; note = 2'-O-Methyl ribonucleotide
  modified_base 11: mod_base = OTHER; note = 2'-fluoro ribonucleotide
  modified_base 12..21: mod_base = OTHER; note = 2'-O-Methyl ribonucleotide
  modified_base 1..3: mod_base = OTHER; note = phosphorothioate linkage
ttactggcaatgtccccaata

SEQ ID NO: 725 - RNA, 21 nt, synthetic construct
  source 1..21: mol_type = other RNA
  modified_base 1..6: mod_base = OTHER; note = 2'-O-Methyl ribonucleotide
  modified_base 7: mod_base = OTHER; note = 2'-fluoro ribonucleotide
  modified_base 8: mod_base = OTHER; note = 2'-O-Methyl ribonucleotide
  modified_base 9: mod_base = OTHER; note = 2'-fluoro ribonucleotide
  modified_base 10: mod_base = OTHER; note = 2'-O-Methyl ribonucleotide
  modified_base 11: mod_base = OTHER; note = 2'-fluoro ribonucleotide
  modified_base 12..21: mod_base = OTHER; note = 2'-O-Methyl ribonucleotide
  modified_base 1..3: mod_base = OTHER; note = phosphorothioate linkage
gcaatgtccccaatgcaatca

SEQ ID NO: 726 - RNA, 21 nt, synthetic construct
  source 1..21: mol_type = other RNA
  modified_base 1..6: mod_base = OTHER; note = 2'-O-Methyl ribonucleotide
  modified_base 7: mod_base = OTHER; note = 2'-fluoro ribonucleotide
  modified_base 8: mod_base = OTHER; note = 2'-O-Methyl ribonucleotide
  modified_base 9: mod_base = OTHER; note = 2'-fluoro ribonucleotide
  modified_base 10: mod_base = OTHER; note = 2'-O-Methyl ribonucleotide
  modified_base 11: mod_base = OTHER; note = 2'-fluoro ribonucleotide
  modified_base 12..21: mod_base = OTHER; note = 2'-O-Methyl ribonucleotide
  modified_base 1..3: mod_base = OTHER; note = phosphorothioate linkage
caatgtccccaatgcaatcca

SEQ ID NO: 727 - RNA, 21 nt, synthetic construct
  source 1..21: mol_type = other RNA
  modified_base 1..6: mod_base = OTHER; note = 2'-O-Methyl ribonucleotide
  modified_base 7: mod_base = OTHER; note = 2'-fluoro ribonucleotide
  modified_base 8: mod_base = OTHER; note = 2'-O-Methyl ribonucleotide
  modified_base 9: mod_base = OTHER; note = 2'-fluoro ribonucleotide
  modified_base 10: mod_base = OTHER; note = 2'-O-Methyl ribonucleotide
  modified_base 11: mod_base = OTHER; note = 2'-fluoro ribonucleotide
  modified_base 12..21: mod_base = OTHER; note = 2'-O-Methyl ribonucleotide
  modified_base 1..3: mod_base = OTHER; note = phosphorothioate linkage
atgtccccaatgcaatcccga

SEQ ID NO: 728 - RNA, 21 nt, synthetic construct
  source 1..21: mol_type = other RNA
  modified_base 1..6: mod_base = OTHER; note = 2'-O-Methyl ribonucleotide
  modified_base 7: mod_base = OTHER; note = 2'-fluoro ribonucleotide
  modified_base 8: mod_base = OTHER; note = 2'-O-Methyl ribonucleotide
  modified_base 9: mod_base = OTHER; note = 2'-fluoro ribonucleotide
  modified_base 10: mod_base = OTHER; note = 2'-O-Methyl ribonucleotide
  modified_base 11: mod_base = OTHER; note = 2'-fluoro ribonucleotide
  modified_base 12..21: mod_base = OTHER; note = 2'-O-Methyl ribonucleotide
  modified_base 1..3: mod_base = OTHER; note = phosphorothioate linkage
ccccaatgcaatcccggaaaa

SEQ ID NO: 729 - RNA, 21 nt, synthetic construct
  source 1..21: mol_type = other RNA
  modified_base 1..6: mod_base = OTHER; note = 2'-O-Methyl ribonucleotide
  modified_base 7: mod_base = OTHER; note = 2'-fluoro ribonucleotide
  modified_base 8: mod_base = OTHER; note = 2'-O-Methyl ribonucleotide
  modified_base 9: mod_base = OTHER; note = 2'-fluoro ribonucleotide
  modified_base 10: mod_base = OTHER; note = 2'-O-Methyl ribonucleotide
  modified_base 11: mod_base = OTHER; note = 2'-fluoro ribonucleotide
  modified_base 12..21: mod_base = OTHER; note = 2'-O-Methyl ribonucleotide
  modified_base 1..3: mod_base = OTHER; note = phosphorothioate linkage
caatgcaatcccggaaaacaa

SEQ ID NO: 730 - RNA, 21 nt, synthetic construct
  source 1..21: mol_type = other RNA
  modified_base 1..6: mod_base = OTHER; note = 2'-O-Methyl ribonucleotide
  modified_base 7: mod_base = OTHER; note = 2'-fluoro ribonucleotide
  modified_base 8: mod_base = OTHER; note = 2'-O-Methyl ribonucleotide
  modified_base 9: mod_base = OTHER; note = 2'-fluoro ribonucleotide
  modified_base 10: mod_base = OTHER; note = 2'-O-Methyl ribonucleotide
  modified_base 11: mod_base = OTHER; note = 2'-fluoro ribonucleotide
  modified_base 12..21: mod_base = OTHER; note = 2'-O-Methyl ribonucleotide
  modified_base 1..3: mod_base = OTHER; note = phosphorothioate linkage
aatgcaatcccggaaaacaaa

SEQ ID NO: 731 - RNA, 21 nt, synthetic construct
  source 1..21: mol_type = other RNA
  modified_base 1..6: mod_base = OTHER; note = 2'-O-Methyl ribonucleotide
  modified_base 7: mod_base = OTHER; note = 2'-fluoro ribonucleotide
  modified_base 8: mod_base = OTHER; note = 2'-O-Methyl ribonucleotide
  modified_base 9: mod_base = OTHER; note = 2'-fluoro ribonucleotide
  modified_base 10: mod_base = OTHER; note = 2'-O-Methyl ribonucleotide
  modified_base 11: mod_base = OTHER; note = 2'-fluoro ribonucleotide
  modified_base 12..21: mod_base = OTHER; note = 2'-O-Methyl ribonucleotide
  modified_base 1..3: mod_base = OTHER; note = phosphorothioate linkage
atgcaatcccggaaaacaaaa

SEQ ID NO: 732 - RNA, 21 nt, synthetic construct
  source 1..21: mol_type = other RNA
  modified_base 1..6: mod_base = OTHER; note = 2'-O-Methyl ribonucleotide
  modified_base 7: mod_base = OTHER; note = 2'-fluoro ribonucleotide
  modified_base 8: mod_base = OTHER; note = 2'-O-Methyl ribonucleotide
  modified_base 9: mod_base = OTHER; note = 2'-fluoro ribonucleotide
  modified_base 10: mod_base = OTHER; note = 2'-O-Methyl ribonucleotide
  modified_base 11: mod_base = OTHER; note = 2'-fluoro ribonucleotide
  modified_base 12..21: mod_base = OTHER; note = 2'-O-Methyl ribonucleotide
  modified_base 1..3: mod_base = OTHER; note = phosphorothioate linkage
tgcaatcccggaaaacaaaga

SEQ ID NO: 733 - RNA, 21 nt, synthetic construct
  source 1..21: mol_type = other RNA
  modified_base 1..6: mod_base = OTHER; note = 2'-O-Methyl ribonucleotide
  modified_base 7: mod_base = OTHER; note = 2'-fluoro ribonucleotide
  modified_base 8: mod_base = OTHER; note = 2'-O-Methyl ribonucleotide
  modified_base 9: mod_base = OTHER; note = 2'-fluoro ribonucleotide
  modified_base 10: mod_base = OTHER; note = 2'-O-Methyl ribonucleotide
  modified_base 11: mod_base = OTHER; note = 2'-fluoro ribonucleotide
  modified_base 12..21: mod_base = OTHER; note = 2'-O-Methyl ribonucleotide
  modified_base 1..3: mod_base = OTHER; note = phosphorothioate linkage
gcaatcccggaaaacaaagaa

SEQ ID NO: 734 - RNA, 21 nt, synthetic construct
  source 1..21: mol_type = other RNA
  modified_base 1..6: mod_base = OTHER; note = 2'-O-Methyl ribonucleotide
  modified_base 7: mod_base = OTHER; note = 2'-fluoro ribonucleotide
  modified_base 8: mod_base = OTHER; note = 2'-O-Methyl ribonucleotide
  modified_base 9: mod_base = OTHER; note = 2'-fluoro ribonucleotide
  modified_base 10: mod_base = OTHER; note = 2'-O-Methyl ribonucleotide
  modified_base 11: mod_base = OTHER; note = 2'-fluoro ribonucleotide
  modified_base 12..21: mod_base = OTHER; note = 2'-O-Methyl ribonucleotide
  modified_base 1..3: mod_base = OTHER; note = phosphorothioate linkage
caatcccggaaaacaaagata

SEQ ID NO: 735 - RNA, 21 nt, synthetic construct
  source 1..21: mol_type = other RNA
  modified_base 1..6: mod_base = OTHER; note = 2'-O-Methyl ribonucleotide
  modified_base 7: mod_base = OTHER; note = 2'-fluoro ribonucleotide
  modified_base 8: mod_base = OTHER; note = 2'-O-Methyl ribonucleotide
  modified_base 9: mod_base = OTHER; note = 2'-fluoro ribonucleotide
  modified_base 10: mod_base = OTHER; note = 2'-O-Methyl ribonucleotide
  modified_base 11: mod_base = OTHER; note = 2'-fluoro ribonucleotide
  modified_base 12..21: mod_base = OTHER; note = 2'-O-Methyl ribonucleotide
  modified_base 1..3: mod_base = OTHER; note = phosphorothioate linkage
gatttggtgttttctacttga

SEQ ID NO: 736 - RNA, 21 nt, synthetic construct
  source 1..21: mol_type = other RNA
  modified_base 1..6: mod_base = OTHER; note = 2'-O-Methyl ribonucleotide
  modified_base 7: mod_base = OTHER; note = 2'-fluoro ribonucleotide
  modified_base 8: mod_base = OTHER; note = 2'-O-Methyl ribonucleotide
  modified_base 9: mod_base = OTHER; note = 2'-fluoro ribonucleotide
  modified_base 10: mod_base = OTHER; note = 2'-O-Methyl ribonucleotide
  modified_base 11: mod_base = OTHER; note = 2'-fluoro ribonucleotide
  modified_base 12..21: mod_base = OTHER; note = 2'-O-Methyl ribonucleotide
  modified_base 1..3: mod_base = OTHER; note = phosphorothioate linkage
atttggtgttttctacttgga

SEQ ID NO: 737 - RNA, 21 nt, synthetic construct
  source 1..21: mol_type = other RNA
  modified_base 1..6: mod_base = OTHER; note = 2'-O-Methyl ribonucleotide
  modified_base 7: mod_base = OTHER; note = 2'-fluoro ribonucleotide
  modified_base 8: mod_base = OTHER; note = 2'-O-Methyl ribonucleotide
  modified_base 9: mod_base = OTHER; note = 2'-fluoro ribonucleotide
  modified_base 10: mod_base = OTHER; note = 2'-O-Methyl ribonucleotide
  modified_base 11: mod_base = OTHER; note = 2'-fluoro ribonucleotide
  modified_base 12..21: mod_base = OTHER; note = 2'-O-Methyl ribonucleotide
  modified_base 1..3: mod_base = OTHER; note = phosphorothioate linkage
tttggtgttttctacttggga

SEQ ID NO: 738 - RNA, 21 nt, synthetic construct
  source 1..21: mol_type = other RNA
  modified_base 1..6: mod_base = OTHER; note = 2'-O-Methyl ribonucleotide
  modified_base 7: mod_base = OTHER; note = 2'-fluoro ribonucleotide
  modified_base 8: mod_base = OTHER; note = 2'-O-Methyl ribonucleotide
  modified_base 9: mod_base = OTHER; note = 2'-fluoro ribonucleotide
  modified_base 10: mod_base = OTHER; note = 2'-O-Methyl ribonucleotide
  modified_base 11: mod_base = OTHER; note = 2'-fluoro ribonucleotide
  modified_base 12..21: mod_base = OTHER; note = 2'-O-Methyl ribonucleotide
  modified_base 1..3: mod_base = OTHER; note = phosphorothioate linkage
tgttttctacttgggatcaca

SEQ ID NO: 739 - RNA, 21 nt, synthetic construct
  source 1..21: mol_type = other RNA
  modified_base 1..6: mod_base = OTHER; note = 2'-O-Methyl ribonucleotide
  modified_base 7: mod_base = OTHER; note = 2'-fluoro ribonucleotide
  modified_base 8: mod_base = OTHER; note = 2'-O-Methyl ribonucleotide
  modified_base 9: mod_base = OTHER; note = 2'-fluoro ribonucleotide
  modified_base 10: mod_base = OTHER; note = 2'-O-Methyl ribonucleotide
  modified_base 11: mod_base = OTHER; note = 2'-fluoro ribonucleotide
  modified_base 12..21: mod_base = OTHER; note = 2'-O-Methyl ribonucleotide
  modified_base 1..3: mod_base = OTHER; note = phosphorothioate linkage
tttctacttgggatcacaaaa

SEQ ID NO: 740 - RNA, 21 nt, synthetic construct
  source 1..21: mol_type = other RNA
  modified_base 1..6: mod_base = OTHER; note = 2'-O-Methyl ribonucleotide
  modified_base 7: mod_base = OTHER; note = 2'-fluoro ribonucleotide
  modified_base 8: mod_base = OTHER; note = 2'-O-Methyl ribonucleotide
  modified_base 9: mod_base = OTHER; note = 2'-fluoro ribonucleotide
  modified_base 10: mod_base = OTHER; note = 2'-O-Methyl ribonucleotide
  modified_base 11: mod_base = OTHER; note = 2'-fluoro ribonucleotide
  modified_base 12..21: mod_base = OTHER; note = 2'-O-Methyl ribonucleotide
  modified_base 1..3: mod_base = OTHER; note = phosphorothioate linkage
ttctacttgggatcacaaaga

SEQ ID NO: 741 - RNA, 21 nt, synthetic construct
  source 1..21: mol_type = other RNA
  modified_base 1..6: mod_base = OTHER; note = 2'-O-Methyl ribonucleotide
  modified_base 7: mod_base = OTHER; note = 2'-fluoro ribonucleotide
  modified_base 8: mod_base = OTHER; note = 2'-O-Methyl ribonucleotide
  modified_base 9: mod_base = OTHER; note = 2'-fluoro ribonucleotide
  modified_base 10: mod_base = OTHER; note = 2'-O-Methyl ribonucleotide
  modified_base 11: mod_base = OTHER; note = 2'-fluoro ribonucleotide
  modified_base 12..21: mod_base = OTHER; note = 2'-O-Methyl ribonucleotide
  modified_base 1..3: mod_base = OTHER; note = phosphorothioate linkage
ctacttgggatcacaaagcaa

SEQ ID NO: 742 - RNA, 21 nt, synthetic construct
  source 1..21: mol_type = other RNA
  modified_base 1..6: mod_base = OTHER; note = 2'-O-Methyl ribonucleotide
  modified_base 7: mod_base = OTHER; note = 2'-fluoro ribonucleotide
  modified_base 8: mod_base = OTHER; note = 2'-O-Methyl ribonucleotide
  modified_base 9: mod_base = OTHER; note = 2'-fluoro ribonucleotide
  modified_base 10: mod_base = OTHER; note = 2'-O-Methyl ribonucleotide
  modified_base 11: mod_base = OTHER; note = 2'-fluoro ribonucleotide
  modified_base 12..21: mod_base = OTHER; note = 2'-O-Methyl ribonucleotide
  modified_base 1..3: mod_base = OTHER; note = phosphorothioate linkage
tacttgggatcacaaagcaaa

SEQ ID NO: 743 - RNA, 21 nt, synthetic construct
  source 1..21: mol_type = other RNA
  modified_base 1..6: mod_base = OTHER; note = 2'-O-Methyl ribonucleotide
  modified_base 7: mod_base = OTHER; note = 2'-fluoro ribonucleotide
  modified_base 8: mod_base = OTHER; note = 2'-O-Methyl ribonucleotide
  modified_base 9: mod_base = OTHER; note = 2'-fluoro ribonucleotide
  modified_base 10: mod_base = OTHER; note = 2'-O-Methyl ribonucleotide
  modified_base 11: mod_base = OTHER; note = 2'-fluoro ribonucleotide
  modified_base 12..21: mod_base = OTHER; note = 2'-O-Methyl ribonucleotide
  modified_base 1..3: mod_base = OTHER; note = phosphorothioate linkage
aatggtaaatataacaaacca

SEQ ID NO: 744 - RNA, 21 nt, synthetic construct
  source 1..21: mol_type = other RNA
  modified_base 1..6: mod_base = OTHER; note = 2'-O-Methyl ribonucleotide
  modified_base 7: mod_base = OTHER; note = 2'-fluoro ribonucleotide
  modified_base 8: mod_base = OTHER; note = 2'-O-Methyl ribonucleotide
  modified_base 9: mod_base = OTHER; note = 2'-fluoro ribonucleotide
  modified_base 10: mod_base = OTHER; note = 2'-O-Methyl ribonucleotide
  modified_base 11: mod_base = OTHER; note = 2'-fluoro ribonucleotide
  modified_base 12..21: mod_base = OTHER; note = 2'-O-Methyl ribonucleotide
  modified_base 1..3: mod_base = OTHER; note = phosphorothioate linkage
gaagtctcaaaatggaaggta

SEQ ID NO: 745 - RNA, 21 nt, synthetic construct
  source 1..21: mol_type = other RNA
  modified_base 1..6: mod_base = OTHER; note = 2'-O-Methyl ribonucleotide
  modified_base 7: mod_base = OTHER; note = 2'-fluoro ribonucleotide
  modified_base 8: mod_base = OTHER; note = 2'-O-Methyl ribonucleotide
  modified_base 9: mod_base = OTHER; note = 2'-fluoro ribonucleotide
  modified_base 10: mod_base = OTHER; note = 2'-O-Methyl ribonucleotide
  modified_base 11: mod_base = OTHER; note = 2'-fluoro ribonucleotide
  modified_base 12..21: mod_base = OTHER; note = 2'-O-Methyl ribonucleotide
  modified_base 1..3: mod_base = OTHER; note = phosphorothioate linkage
aaaatggaaggttatactcta

SEQ ID NO: 746 - RNA, 21 nt, synthetic construct
  source 1..21: mol_type = other RNA
  modified_base 1..6: mod_base = OTHER; note = 2'-O-Methyl ribonucleotide
  modified_base 7: mod_base = OTHER; note = 2'-fluoro ribonucleotide
  modified_base 8: mod_base = OTHER; note = 2'-O-Methyl ribonucleotide
  modified_base 9: mod_base = OTHER; note = 2'-fluoro ribonucleotide
  modified_base 10: mod_base = OTHER; note = 2'-O-Methyl ribonucleotide
  modified_base 11: mod_base = OTHER; note = 2'-fluoro ribonucleotide
  modified_base 12..21: mod_base = OTHER; note = 2'-O-Methyl ribonucleotide
  modified_base 1..3: mod_base = OTHER; note = phosphorothioate linkage
aaatggaaggttatactctaa

SEQ ID NO: 747 - RNA, 21 nt, synthetic construct
  source 1..21: mol_type = other RNA
  modified_base 1..6: mod_base = OTHER; note = 2'-O-Methyl ribonucleotide
  modified_base 7: mod_base = OTHER; note = 2'-fluoro ribonucleotide
  modified_base 8: mod_base = OTHER; note = 2'-O-Methyl ribonucleotide
  modified_base 9: mod_base = OTHER; note = 2'-fluoro ribonucleotide
  modified_base 10: mod_base = OTHER; note = 2'-O-Methyl ribonucleotide
  modified_base 11: mod_base = OTHER; note = 2'-fluoro ribonucleotide
  modified_base 12..21: mod_base = OTHER; note = 2'-O-Methyl ribonucleotide
  modified_base 1..3: mod_base = OTHER; note = phosphorothioate linkage
aatggaaggttatactctata

SEQ ID NO: 748 - RNA, 21 nt, synthetic construct
  source 1..21: mol_type = other RNA
  modified_base 1..6: mod_base = OTHER; note = 2'-O-Methyl ribonucleotide
  modified_base 7: mod_base = OTHER; note = 2'-fluoro ribonucleotide
  modified_base 8: mod_base = OTHER; note = 2'-O-Methyl ribonucleotide
  modified_base 9: mod_base = OTHER; note = 2'-fluoro ribonucleotide
  modified_base 10: mod_base = OTHER; note = 2'-O-Methyl ribonucleotide
  modified_base 11: mod_base = OTHER; note = 2'-fluoro ribonucleotide
  modified_base 12..21: mod_base = OTHER; note = 2'-O-Methyl ribonucleotide
  modified_base 1..3: mod_base = OTHER; note = phosphorothioate linkage
gaaggttatactctataaaaa

SEQ ID NO: 749 - RNA, 21 nt, synthetic construct
  source 1..21: mol_type = other RNA
  modified_base 1..6: mod_base = OTHER; note = 2'-O-Methyl ribonucleotide
  modified_base 7: mod_base = OTHER; note = 2'-fluoro ribonucleotide
  modified_base 8: mod_base = OTHER; note = 2'-O-Methyl ribonucleotide
  modified_base 9: mod_base = OTHER; note = 2'-fluoro ribonucleotide
  modified_base 10: mod_base = OTHER; note = 2'-O-Methyl ribonucleotide
  modified_base 11: mod_base = OTHER; note = 2'-fluoro ribonucleotide
  modified_base 12..21: mod_base = OTHER; note = 2'-O-Methyl ribonucleotide
  modified_base 1..3: mod_base = OTHER; note = phosphorothioate linkage
aggttatactctataaaatca

SEQ ID NO: 750 - RNA, 21 nt, synthetic construct
  source 1..21: mol_type = other RNA
  modified_base 1..6: mod_base = OTHER; note = 2'-O-Methyl ribonucleotide
  modified_base 7: mod_base = OTHER; note = 2'-fluoro ribonucleotide
  modified_base 8: mod_base = OTHER; note = 2'-O-Methyl ribonucleotide
  modified_base 9: mod_base = OTHER; note = 2'-fluoro ribonucleotide
  modified_base 10: mod_base = OTHER; note = 2'-O-Methyl ribonucleotide
  modified_base 11: mod_base = OTHER; note = 2'-fluoro ribonucleotide
  modified_base 12..21: mod_base = OTHER; note = 2'-O-Methyl ribonucleotide
  modified_base 1..3: mod_base = OTHER; note = phosphorothioate linkage
aatcaaccaaaatgttgatca

SEQ ID NO: 751 - RNA, 21 nt, synthetic construct
  source 1..21: mol_type = other RNA
  modified_base 1..6: mod_base = OTHER; note = 2'-O-Methyl ribonucleotide
  modified_base 7: mod_base = OTHER; note = 2'-fluoro ribonucleotide
  modified_base 8: mod_base = OTHER; note = 2'-O-Methyl ribonucleotide
  modified_base 9: mod_base = OTHER; note = 2'-fluoro ribonucleotide
  modified_base 10: mod_base = OTHER; note = 2'-O-Methyl ribonucleotide
  modified_base 11: mod_base = OTHER; note = 2'-fluoro ribonucleotide
  modified_base 12..21: mod_base = OTHER; note = 2'-O-Methyl ribonucleotide
  modified_base 1..3: mod_base = OTHER; note = phosphorothioate linkage
atcaaccaaaatgttgatcca

SEQ ID NO: 752 - RNA, 21 nt, synthetic construct
  source 1..21: mol_type = other RNA
  modified_base 1..6: mod_base = OTHER; note = 2'-O-Methyl ribonucleotide
  modified_base 7: mod_base = OTHER; note = 2'-fluoro ribonucleotide
  modified_base 8: mod_base = OTHER; note = 2'-O-Methyl ribonucleotide
  modified_base 9: mod_base = OTHER; note = 2'-fluoro ribonucleotide
  modified_base 10: mod_base = OTHER; note = 2'-O-Methyl ribonucleotide
  modified_base 11: mod_base = OTHER; note = 2'-fluoro ribonucleotide
  modified_base 12..21: mod_base = OTHER; note = 2'-O-Methyl ribonucleotide
  modified_base 1..3: mod_base = OTHER; note = phosphorothioate linkage
tcaaccaaaatgttgatccaa

SEQ ID NO: 753 - RNA, 21 nt, synthetic construct
  source 1..21: mol_type = other RNA
  modified_base 1..6: mod_base = OTHER; note = 2'-O-Methyl ribonucleotide
  modified_base 7: mod_base = OTHER; note = 2'-fluoro ribonucleotide
  modified_base 8: mod_base = OTHER; note = 2'-O-Methyl ribonucleotide
  modified_base 9: mod_base = OTHER; note = 2'-fluoro ribonucleotide
  modified_base 10: mod_base = OTHER; note = 2'-O-Methyl ribonucleotide
  modified_base 11: mod_base = OTHER; note = 2'-fluoro ribonucleotide
  modified_base 12..21: mod_base = OTHER; note = 2'-O-Methyl ribonucleotide
  modified_base 1..3: mod_base = OTHER; note = phosphorothioate linkage
caaccaaaatgttgatccata

SEQ ID NO: 754 - RNA, 21 nt, synthetic construct
  source 1..21: mol_type = other RNA
  modified_base 1..6: mod_base = OTHER; note = 2'-O-Methyl ribonucleotide
  modified_base 7: mod_base = OTHER; note = 2'-fluoro ribonucleotide
  modified_base 8: mod_base = OTHER; note = 2'-O-Methyl ribonucleotide
  modified_base 9: mod_base = OTHER; note = 2'-fluoro ribonucleotide
  modified_base 10: mod_base = OTHER; note = 2'-O-Methyl ribonucleotide
  modified_base 11: mod_base = OTHER; note = 2'-fluoro ribonucleotide
  modified_base 12..21: mod_base = OTHER; note = 2'-O-Methyl ribonucleotide
  modified_base 1..3: mod_base = OTHER; note = phosphorothioate linkage
accaaaatgttgatccatcca

SEQ ID NO: 755 - RNA, 21 nt, synthetic construct
  source 1..21: mol_type = other RNA
  modified_base 1..6: mod_base = OTHER; note = 2'-O-Methyl ribonucleotide
  modified_base 7: mod_base = OTHER; note = 2'-fluoro ribonucleotide
  modified_base 8: mod_base = OTHER; note = 2'-O-Methyl ribonucleotide
  modified_base 9: mod_base = OTHER; note = 2'-fluoro ribonucleotide
  modified_base 10: mod_base = OTHER; note = 2'-O-Methyl ribonucleotide
  modified_base 11: mod_base = OTHER; note = 2'-fluoro ribonucleotide
  modified_base 12..21: mod_base = OTHER; note = 2'-O-Methyl ribonucleotide
  modified_base 1..3: mod_base = OTHER; note = phosphorothioate linkage
ccaaaatgttgatccatccaa

SEQ ID NO: 756 - RNA, 21 nt, synthetic construct
  source 1..21: mol_type = other RNA
  modified_base 1..6: mod_base = OTHER; note = 2'-O-Methyl ribonucleotide
  modified_base 7: mod_base = OTHER; note = 2'-fluoro ribonucleotide
  modified_base 8: mod_base = OTHER; note = 2'-O-Methyl ribonucleotide
  modified_base 9: mod_base = OTHER; note = 2'-fluoro ribonucleotide
  modified_base 10: mod_base = OTHER; note = 2'-O-Methyl ribonucleotide
  modified_base 11: mod_base = OTHER; note = 2'-fluoro ribonucleotide
  modified_base 12..21: mod_base = OTHER; note = 2'-O-Methyl ribonucleotide
  modified_base 1..3: mod_base = OTHER; note = phosphorothioate linkage
aacctcattccaagttaatga

SEQ ID NO: 757 - RNA, 21 nt, synthetic construct
  source 1..21: mol_type = other RNA
  modified_base 1..6: mod_base = OTHER; note = 2'-O-Methyl ribonucleotide
  modified_base 7: mod_base = OTHER; note = 2'-fluoro ribonucleotide
  modified_base 8: mod_base = OTHER; note = 2'-O-Methyl ribonucleotide
  modified_base 9: mod_base = OTHER; note = 2'-fluoro ribonucleotide
  modified_base 10: mod_base = OTHER; note = 2'-O-Methyl ribonucleotide
  modified_base 11: mod_base = OTHER; note = 2'-fluoro ribonucleotide
  modified_base 12..21: mod_base = OTHER; note = 2'-O-Methyl ribonucleotide
  modified_base 1..3: mod_base = OTHER; note = phosphorothioate linkage
ataatctggtattaaatccta

SEQ ID NO: 758 - RNA, 21 nt, synthetic construct
  source 1..21: mol_type = other RNA
  modified_base 1..6: mod_base = OTHER; note = 2'-O-Methyl ribonucleotide
  modified_base 7: mod_base = OTHER; note = 2'-fluoro ribonucleotide
  modified_base 8: mod_base = OTHER; note = 2'-O-Methyl ribonucleotide
  modified_base 9: mod_base = OTHER; note = 2'-fluoro ribonucleotide
  modified_base 10: mod_base = OTHER; note = 2'-O-Methyl ribonucleotide
  modified_base 11: mod_base = OTHER; note = 2'-fluoro ribonucleotide
  modified_base 12..21: mod_base = OTHER; note = 2'-O-Methyl ribonucleotide
  modified_base 1..3: mod_base = OTHER; note = phosphorothioate linkage
aatctggtattaaatccttaa

SEQ ID NO: 759 - RNA, 21 nt, synthetic construct
  source 1..21: mol_type = other RNA
  modified_base 1..6: mod_base = OTHER; note = 2'-O-Methyl ribonucleotide
  modified_base 7: mod_base = OTHER; note = 2'-fluoro ribonucleotide
  modified_base 8: mod_base = OTHER; note = 2'-O-Methyl ribonucleotide
  modified_base 9: mod_base = OTHER; note = 2'-fluoro ribonucleotide
  modified_base 10: mod_base = OTHER; note = 2'-O-Methyl ribonucleotide
  modified_base 11: mod_base = OTHER; note = 2'-fluoro ribonucleotide
  modified_base 12..21: mod_base = OTHER; note = 2'-O-Methyl ribonucleotide
  modified_base 1..3: mod_base = OTHER; note = phosphorothioate linkage
tctggtattaaatccttaaga

SEQ ID NO: 760 - RNA, 21 nt, synthetic construct
  source 1..21: mol_type = other RNA
  modified_base 1..6: mod_base = OTHER; note = 2'-O-Methyl ribonucleotide
  modified_base 7: mod_base = OTHER; note = 2'-fluoro ribonucleotide
  modified_base 8: mod_base = OTHER; note = 2'-O-Methyl ribonucleotide
  modified_base 9: mod_base = OTHER; note = 2'-fluoro ribonucleotide
  modified_base 10: mod_base = OTHER; note = 2'-O-Methyl ribonucleotide
  modified_base 11: mod_base = OTHER; note = 2'-fluoro ribonucleotide
  modified_base 12..21: mod_base = OTHER; note = 2'-O-Methyl ribonucleotide
  modified_base 1..3: mod_base = OTHER; note = phosphorothioate linkage
atttaagattaaacatacaaa

SEQ ID NO: 761 - RNA, 21 nt, synthetic construct
  source 1..21: mol_type = other RNA
  modified_base 1..6: mod_base = OTHER; note = 2'-O-Methyl ribonucleotide
  modified_base 7: mod_base = OTHER; note = 2'-fluoro ribonucleotide
  modified_base 8: mod_base = OTHER; note = 2'-O-Methyl ribonucleotide
  modified_base 9: mod_base = OTHER; note = 2'-fluoro ribonucleotide
  modified_base 10: mod_base = OTHER; note = 2'-O-Methyl ribonucleotide
  modified_base 11: mod_base = OTHER; note = 2'-fluoro ribonucleotide
  modified_base 12..21: mod_base = OTHER; note = 2'-O-Methyl ribonucleotide
  modified_base 1..3: mod_base = OTHER; note = phosphorothioate linkage
taagattaaacatacaatcaa

SEQ ID NO: 762 - RNA, 21 nt, synthetic construct
  source 1..21: mol_type = other RNA
  modified_base 1..6: mod_base = OTHER; note = 2'-O-Methyl ribonucleotide
  modified_base 7: mod_base = OTHER; note = 2'-fluoro ribonucleotide
  modified_base 8: mod_base = OTHER; note = 2'-O-Methyl ribonucleotide
  modified_base 9: mod_base = OTHER; note = 2'-fluoro ribonucleotide
  modified_base 10: mod_base = OTHER; note = 2'-O-Methyl ribonucleotide
  modified_base 11: mod_base = OTHER; note = 2'-fluoro ribonucleotide
  modified_base 12..21: mod_base = OTHER; note = 2'-O-Methyl ribonucleotide
  modified_base 1..3: mod_base = OTHER; note = phosphorothioate linkage
tcacataaccttaaagaataa

SEQ ID NO: 763 - RNA, 21 nt, synthetic construct
  source 1..21: mol_type = other RNA
  modified_base 1..6: mod_base = OTHER; note = 2'-O-Methyl ribonucleotide
  modified_base 7: mod_base = OTHER; note = 2'-fluoro ribonucleotide
  modified_base 8: mod_base = OTHER; note = 2'-O-Methyl ribonucleotide
  modified_base 9: mod_base = OTHER; note = 2'-fluoro ribonucleotide
  modified_base 10: mod_base = OTHER; note = 2'-O-Methyl ribonucleotide
  modified_base 11: mod_base = OTHER; note = 2'-fluoro ribonucleotide
  modified_base 12..21: mod_base = OTHER; note = 2'-O-Methyl ribonucleotide
  modified_base 1..3: mod_base = OTHER; note = phosphorothioate linkage
tgtgatgtgggaatcaattta

SEQ ID NO: 764 - RNA, 21 nt, synthetic construct
  source 1..21: mol_type = other RNA
  modified_base 1..6: mod_base = OTHER; note = 2'-O-Methyl ribonucleotide
  modified_base 7: mod_base = OTHER; note = 2'-fluoro ribonucleotide
  modified_base 8: mod_base = OTHER; note = 2'-O-Methyl ribonucleotide
  modified_base 9: mod_base = OTHER; note = 2'-fluoro ribonucleotide
  modified_base 10: mod_base = OTHER; note = 2'-O-Methyl ribonucleotide
  modified_base 11: mod_base = OTHER; note = 2'-fluoro ribonucleotide
  modified_base 12..21: mod_base = OTHER; note = 2'-O-Methyl ribonucleotide
  modified_base 1..3: mod_base = OTHER; note = phosphorothioate linkage
gggaatcaattttagatggta

SEQ ID NO: 765 - RNA, 21 nt, synthetic construct
  source 1..21: mol_type = other RNA
  modified_base 1..6: mod_base = OTHER; note = 2'-O-Methyl ribonucleotide
  modified_base 7: mod_base = OTHER; note = 2'-fluoro ribonucleotide
  modified_base 8: mod_base = OTHER; note = 2'-O-Methyl ribonucleotide
  modified_base 9: mod_base = OTHER; note = 2'-fluoro ribonucleotide
  modified_base 10: mod_base = OTHER; note = 2'-O-Methyl ribonucleotide
  modified_base 11: mod_base = OTHER; note = 2'-fluoro ribonucleotide
  modified_base 12..21: mod_base = OTHER; note = 2'-O-Methyl ribonucleotide
  modified_base 1..3: mod_base = OTHER; note = phosphorothioate linkage
aggcatcatatgagctaataa

SEQ ID NO: 766 - RNA, 21 nt, synthetic construct
  source 1..21: mol_type = other RNA
  modified_base 1..6: mod_base = OTHER; note = 2'-O-Methyl ribonucleotide
  modified_base 7: mod_base = OTHER; note = 2'-fluoro ribonucleotide
  modified_base 8: mod_base = OTHER; note = 2'-O-Methyl ribonucleotide
  modified_base 9: mod_base = OTHER; note = 2'-fluoro ribonucleotide
  modified_base 10: mod_base = OTHER; note = 2'-O-Methyl ribonucleotide
  modified_base 11: mod_base = OTHER; note = 2'-fluoro ribonucleotide
  modified_base 12..21: mod_base = OTHER; note = 2'-O-Methyl ribonucleotide
  modified_base 1..3: mod_base = OTHER; note = phosphorothioate linkage
atcatatgagctaatatcaca

SEQ ID NO: 767 - RNA, 21 nt, synthetic construct
  source 1..21: mol_type = other RNA
  modified_base 1..6: mod_base = OTHER; note = 2'-O-Methyl ribonucleotide
  modified_base 7: mod_base = OTHER; note = 2'-fluoro ribonucleotide
  modified_base 8: mod_base = OTHER; note = 2'-O-Methyl ribonucleotide
  modified_base 9: mod_base = OTHER; note = 2'-fluoro ribonucleotide
  modified_base 10: mod_base = OTHER; note = 2'-O-Methyl ribonucleotide
  modified_base 11: mod_base = OTHER; note = 2'-fluoro ribonucleotide
  modified_base 12..21: mod_base = OTHER; note = 2'-O-Methyl ribonucleotide
  modified_base 1..3: mod_base = OTHER; note = phosphorothioate linkage
tcatatgagctaatatcacaa

SEQ ID NO: 768 - RNA, 21 nt, synthetic construct
  source 1..21: mol_type = other RNA
  modified_base 1..6: mod_base = OTHER; note = 2'-O-Methyl ribonucleotide
  modified_base 7: mod_base = OTHER; note = 2'-fluoro ribonucleotide
  modified_base 8: mod_base = OTHER; note = 2'-O-Methyl ribonucleotide
  modified_base 9: mod_base = OTHER; note = 2'-fluoro ribonucleotide
  modified_base 10: mod_base = OTHER; note = 2'-O-Methyl ribonucleotide
  modified_base 11: mod_base = OTHER; note = 2'-fluoro ribonucleotide
  modified_base 12..21: mod_base = OTHER; note = 2'-O-Methyl ribonucleotide
  modified_base 1..3: mod_base = OTHER; note = phosphorothioate linkage
gttaaaactctaaacttgaca

SEQ ID NO: 769 - RNA, 21 nt, synthetic construct
  source 1..21: mol_type = other RNA
  modified_base 1..6: mod_base = OTHER; note = 2'-O-Methyl ribonucleotide
  modified_base 7: mod_base = OTHER; note = 2'-fluoro ribonucleotide
  modified_base 8: mod_base = OTHER; note = 2'-O-Methyl ribonucleotide
  modified_base 9: mod_base = OTHER; note = 2'-fluoro ribonucleotide
  modified_base 10: mod_base = OTHER; note = 2'-O-Methyl ribonucleotide
  modified_base 11: mod_base = OTHER; note = 2'-fluoro ribonucleotide
  modified_base 12..21: mod_base = OTHER; note = 2'-O-Methyl ribonucleotide
  modified_base 1..3: mod_base = OTHER; note = phosphorothioate linkage
taaaactctaaacttgactaa

SEQ ID NO: 770 - RNA, 21 nt, synthetic construct
  source 1..21: mol_type = other RNA
  modified_base 1..6: mod_base = OTHER; note = 2'-O-Methyl ribonucleotide
  modified_base 7: mod_base = OTHER; note = 2'-fluoro ribonucleotide
  modified_base 8: mod_base = OTHER; note = 2'-O-Methyl ribonucleotide
  modified_base 9: mod_base = OTHER; note = 2'-fluoro ribonucleotide
  modified_base 10: mod_base = OTHER; note = 2'-O-Methyl ribonucleotide
  modified_base 11: mod_base = OTHER; note = 2'-fluoro ribonucleotide
  modified_base 12..21: mod_base = OTHER; note = 2'-O-Methyl ribonucleotide
  modified_base 1..3: mod_base = OTHER; note = phosphorothioate linkage
actctaaacttgactaaataa

SEQ ID NO: 771 - RNA, 21 nt, synthetic construct
  source 1..21: mol_type = other RNA
  modified_base 1..6: mod_base = OTHER; note = 2'-O-Methyl ribonucleotide
  modified_base 7: mod_base = OTHER; note = 2'-fluoro ribonucleotide
  modified_base 8: mod_base = OTHER; note = 2'-O-Methyl ribonucleotide
  modified_base 9: mod_base = OTHER; note = 2'-fluoro ribonucleotide
  modified_base 10: mod_base = OTHER; note = 2'-O-Methyl ribonucleotide
  modified_base 11: mod_base = OTHER; note = 2'-fluoro ribonucleotide
  modified_base 12..21: mod_base = OTHER; note = 2'-O-Methyl ribonucleotide
  modified_base 1..3: mod_base = OTHER; note = phosphorothioate linkage
atcgtcagcacagagtatgta

SEQ ID NO: 772 - RNA, 21 nt, synthetic construct
  source 1..21: mol_type = other RNA
  modified_base 1..6: mod_base = OTHER; note = 2'-O-Methyl ribonucleotide
  modified_base 7: mod_base = OTHER; note = 2'-fluoro ribonucleotide
  modified_base 8: mod_base = OTHER; note = 2'-O-Methyl ribonucleotide
  modified_base 9: mod_base = OTHER; note = 2'-fluoro ribonucleotide
  modified_base 10: mod_base = OTHER; note = 2'-O-Methyl ribonucleotide
  modified_base 11: mod_base = OTHER; note = 2'-fluoro ribonucleotide
  modified_base 12..21: mod_base = OTHER; note = 2'-O-Methyl ribonucleotide
  modified_base 1..3: mod_base = OTHER; note = phosphorothioate linkage
gactactaagtcacattgaca

SEQ ID NO: 773 - RNA, 21 nt, synthetic construct
  source 1..21: mol_type = other RNA
  modified_base 1..6: mod_base = OTHER; note = 2'-O-Methyl ribonucleotide
  modified_base 7: mod_base = OTHER; note = 2'-fluoro ribonucleotide
  modified_base 8: mod_base = OTHER; note = 2'-O-Methyl ribonucleotide
  modified_base 9: mod_base = OTHER; note = 2'-fluoro ribonucleotide
  modified_base 10: mod_base = OTHER; note = 2'-O-Methyl ribonucleotide
  modified_base 11: mod_base = OTHER; note = 2'-fluoro ribonucleotide
  modified_base 12..21: mod_base = OTHER; note = 2'-O-Methyl ribonucleotide
  modified_base 1..3: mod_base = OTHER; note = phosphorothioate linkage
acatgaggtatcactatacca

SEQ ID NO: 774 - RNA, 21 nt, synthetic construct
  source 1..21: mol_type = other RNA
  modified_base 1..6: mod_base = OTHER; note = 2'-O-Methyl ribonucleotide
  modified_base 7: mod_base = OTHER; note = 2'-fluoro ribonucleotide
  modified_base 8: mod_base = OTHER; note = 2'-O-Methyl ribonucleotide
  modified_base 9: mod_base = OTHER; note = 2'-fluoro ribonucleotide
  modified_base 10: mod_base = OTHER; note = 2'-O-Methyl ribonucleotide
  modified_base 11: mod_base = OTHER; note = 2'-fluoro ribonucleotide
  modified_base 12..21: mod_base = OTHER; note = 2'-O-Methyl ribonucleotide
  modified_base 1..3: mod_base = OTHER; note = phosphorothioate linkage
tggcatcgagttaaagtttaa

SEQ ID NO: 775 - RNA, 21 nt, synthetic construct
  source 1..21: mol_type = other RNA
  modified_base 1..6: mod_base = OTHER; note = 2'-O-Methyl ribonucleotide
  modified_base 7: mod_base = OTHER; note = 2'-fluoro ribonucleotide
  modified_base 8: mod_base = OTHER; note = 2'-O-Methyl ribonucleotide
  modified_base 9: mod_base = OTHER; note = 2'-fluoro ribonucleotide
  modified_base 10: mod_base = OTHER; note = 2'-O-Methyl ribonucleotide
  modified_base 11: mod_base = OTHER; note = 2'-fluoro ribonucleotide
  modified_base 12..21: mod_base = OTHER; note = 2'-O-Methyl ribonucleotide
  modified_base 1..3: mod_base = OTHER; note = phosphorothioate linkage
ggcatcgagttaaagtttata

SEQ ID NO: 776 - RNA, 21 nt, synthetic construct
  source 1..21: mol_type = other RNA
  modified_base 1..6: mod_base = OTHER; note = 2'-O-Methyl ribonucleotide
  modified_base 7: mod_base = OTHER; note = 2'-fluoro ribonucleotide
  modified_base 8: mod_base = OTHER; note = 2'-O-Methyl ribonucleotide
  modified_base 9: mod_base = OTHER; note = 2'-fluoro ribonucleotide
  modified_base 10: mod_base = OTHER; note = 2'-O-Methyl ribonucleotide
  modified_base 11: mod_base = OTHER; note = 2'-fluoro ribonucleotide
  modified_base 12..21: mod_base = OTHER; note = 2'-O-Methyl ribonucleotide
  modified_base 1..3: mod_base = OTHER; note = phosphorothioate linkage
taaagtttatatttcccctaa

SEQ ID NO: 777 - RNA, 21 nt, synthetic construct
  source 1..21: mol_type = other RNA
  modified_base 1..6: mod_base = OTHER; note = 2'-O-Methyl ribonucleotide
  modified_base 7: mod_base = OTHER; note = 2'-fluoro ribonucleotide
  modified_base 8: mod_base = OTHER; note = 2'-O-Methyl ribonucleotide
  modified_base 9: mod_base = OTHER; note = 2'-fluoro ribonucleotide
  modified_base 10: mod_base = OTHER; note = 2'-O-Methyl ribonucleotide
  modified_base 11: mod_base = OTHER; note = 2'-fluoro ribonucleotide
  modified_base 12..21: mod_base = OTHER; note = 2'-O-Methyl ribonucleotide
  modified_base 1..3: mod_base = OTHER; note = phosphorothioate linkage
ttaaacccatttgttaaagga

SEQ ID NO: 778 - RNA, 21 nt, synthetic construct
  source 1..21: mol_type = other RNA
  modified_base 1..6: mod_base = OTHER; note = 2'-O-Methyl ribonucleotide
  modified_base 7: mod_base = OTHER; note = 2'-fluoro ribonucleotide
  modified_base 8: mod_base = OTHER; note = 2'-O-Methyl ribonucleotide
  modified_base 9: mod_base = OTHER; note = 2'-fluoro ribonucleotide
  modified_base 10: mod_base = OTHER; note = 2'-O-Methyl ribonucleotide
  modified_base 11: mod_base = OTHER; note = 2'-fluoro ribonucleotide
  modified_base 12..21: mod_base = OTHER; note = 2'-O-Methyl ribonucleotide
  modified_base 1..3: mod_base = OTHER; note = phosphorothioate linkage
atttgttaaaggatatagtga

SEQ ID NO: 779 - RNA, 21 nt, synthetic construct
  source 1..21: mol_type = other RNA
  modified_base 1..6: mod_base = OTHER; note = 2'-O-Methyl ribonucleotide
  modified_base 7: mod_base = OTHER; note = 2'-fluoro ribonucleotide
  modified_base 8: mod_base = OTHER; note = 2'-O-Methyl ribonucleotide
  modified_base 9: mod_base = OTHER; note = 2'-fluoro ribonucleotide
  modified_base 10: mod_base = OTHER; note = 2'-O-Methyl ribonucleotide
  modified_base 11: mod_base = OTHER; note = 2'-fluoro ribonucleotide
  modified_base 12..21: mod_base = OTHER; note = 2'-O-Methyl ribonucleotide
  modified_base 1..3: mod_base = OTHER; note = phosphorothioate linkage
tttgttaaaggatatagtgca

SEQ ID NO: 780 - RNA, 21 nt, synthetic construct
  source 1..21: mol_type = other RNA
  modified_base 1..6: mod_base = OTHER; note = 2'-O-Methyl ribonucleotide
  modified_base 7: mod_base = OTHER; note = 2'-fluoro ribonucleotide
  modified_base 8: mod_base = OTHER; note = 2'-O-Methyl ribonucleotide
  modified_base 9: mod_base = OTHER; note = 2'-fluoro ribonucleotide
  modified_base 10: mod_base = OTHER; note = 2'-O-Methyl ribonucleotide
  modified_base 11: mod_base = OTHER; note = 2'-fluoro ribonucleotide
  modified_base 12..21: mod_base = OTHER; note = 2'-O-Methyl ribonucleotide
  modified_base 1..3: mod_base = OTHER; note = phosphorothioate linkage
tgttaaaggatatagtgccca

SEQ ID NO: 781 - RNA, 21 nt, synthetic construct
  source 1..21: mol_type = other RNA
  modified_base 1..6: mod_base = OTHER; note = 2'-O-Methyl ribonucleotide
  modified_base 7: mod_base = OTHER; note = 2'-fluoro ribonucleotide
  modified_base 8: mod_base = OTHER; note = 2'-O-Methyl ribonucleotide
  modified_base 9: mod_base = OTHER; note = 2'-fluoro ribonucleotide
  modified_base 10: mod_base = OTHER; note = 2'-O-Methyl ribonucleotide
  modified_base 11: mod_base = OTHER; note = 2'-fluoro ribonucleotide
  modified_base 12..21: mod_base = OTHER; note = 2'-O-Methyl ribonucleotide
  modified_base 1..3: mod_base = OTHER; note = phosphorothioate linkage
gttaaaggatatagtgcccaa

SEQ ID NO: 782 - RNA, 21 nt, synthetic construct
  source 1..21: mol_type = other RNA
  modified_base 1..6: mod_base = OTHER; note = 2'-O-Methyl ribonucleotide
  modified_base 7: mod_base = OTHER; note = 2'-fluoro ribonucleotide
  modified_base 8: mod_base = OTHER; note = 2'-O-Methyl ribonucleotide
  modified_base 9: mod_base = OTHER; note = 2'-fluoro ribonucleotide
  modified_base 10: mod_base = OTHER; note = 2'-O-Methyl ribonucleotide
  modified_base 11: mod_base = OTHER; note = 2'-fluoro ribonucleotide
  modified_base 12..21: mod_base = OTHER; note = 2'-O-Methyl ribonucleotide
  modified_base 1..3: mod_base = OTHER; note = phosphorothioate linkage
aaggatatagtgcccaagtta

SEQ ID NO: 783 - RNA, 21 nt, synthetic construct
  source 1..21: mol_type = other RNA
  modified_base 1..6: mod_base = OTHER; note = 2'-O-Methyl ribonucleotide
  modified_base 7: mod_base = OTHER; note = 2'-fluoro ribonucleotide
  modified_base 8: mod_base = OTHER; note = 2'-O-Methyl ribonucleotide
  modified_base 9: mod_base = OTHER; note = 2'-fluoro ribonucleotide
  modified_base 10: mod_base = OTHER; note = 2'-O-Methyl ribonucleotide
  modified_base 11: mod_base = OTHER; note = 2'-fluoro ribonucleotide
  modified_base 12..21: mod_base = OTHER; note = 2'-O-Methyl ribonucleotide
  modified_base 1..3: mod_base = OTHER; note = phosphorothioate linkage
aggatatagtgcccaagttaa

SEQ ID NO: 784 - RNA, 21 nt, synthetic construct
  source 1..21: mol_type = other RNA
  modified_base 1..6: mod_base = OTHER; note = 2'-O-Methyl ribonucleotide
  modified_base 7: mod_base = OTHER; note = 2'-fluoro ribonucleotide
  modified_base 8: mod_base = OTHER; note = 2'-O-Methyl ribonucleotide
  modified_base 9: mod_base = OTHER; note = 2'-fluoro ribonucleotide
  modified_base 10: mod_base = OTHER; note = 2'-O-Methyl ribonucleotide
  modified_base 11: mod_base = OTHER; note = 2'-fluoro ribonucleotide
  modified_base 12..21: mod_base = OTHER; note = 2'-O-Methyl ribonucleotide
  modified_base 1..3: mod_base = OTHER; note = phosphorothioate linkage
ggatatagtgcccaagttata

SEQ ID NO: 785 - RNA, 21 nt, synthetic construct
  source 1..21: mol_type = other RNA
  modified_base 1..6: mod_base = OTHER; note = 2'-O-Methyl ribonucleotide
  modified_base 7: mod_base = OTHER; note = 2'-fluoro ribonucleotide
  modified_base 8: mod_base = OTHER; note = 2'-O-Methyl ribonucleotide
  modified_base 9: mod_base = OTHER; note = 2'-fluoro ribonucleotide
  modified_base 10: mod_base = OTHER; note = 2'-O-Methyl ribonucleotide
  modified_base 11: mod_base = OTHER; note = 2'-fluoro ribonucleotide
  modified_base 12..21: mod_base = OTHER; note = 2'-O-Methyl ribonucleotide
  modified_base 1..3: mod_base = OTHER; note = phosphorothioate linkage
gatatagtgcccaagttataa

SEQ ID NO: 786 - RNA, 21 nt, synthetic construct
  source 1..21: mol_type = other RNA
  modified_base 1..6: mod_base = OTHER; note = 2'-O-Methyl ribonucleotide
  modified_base 7: mod_base = OTHER; note = 2'-fluoro ribonucleotide
  modified_base 8: mod_base = OTHER; note = 2'-O-Methyl ribonucleotide
  modified_base 9: mod_base = OTHER; note = 2'-fluoro ribonucleotide
  modified_base 10: mod_base = OTHER; note = 2'-O-Methyl ribonucleotide
  modified_base 11: mod_base = OTHER; note = 2'-fluoro ribonucleotide
  modified_base 12..21: mod_base = OTHER; note = 2'-O-Methyl ribonucleotide
  modified_base 1..3: mod_base = OTHER; note = phosphorothioate linkage
atggtgacctacctttgtcaa

SEQ ID NO: 787 - RNA, 21 nt, synthetic construct
  source 1..21: mol_type = other RNA
  modified_base 1..6: mod_base = OTHER; note = 2'-O-Methyl ribonucleotide
  modified_base 7: mod_base = OTHER; note = 2'-fluoro ribonucleotide
  modified_base 8: mod_base = OTHER; note = 2'-O-Methyl ribonucleotide
  modified_base 9: mod_base = OTHER; note = 2'-fluoro ribonucleotide
  modified_base 10: mod_base = OTHER; note = 2'-O-Methyl ribonucleotide
  modified_base 11: mod_base = OTHER; note = 2'-fluoro ribonucleotide
  modified_base 12..21: mod_base = OTHER; note = 2'-O-Methyl ribonucleotide
  modified_base 1..3: mod_base = OTHER; note = phosphorothioate linkage
tggtgacctacctttgtcaaa

SEQ ID NO: 788 - RNA, 21 nt, synthetic construct
  source 1..21: mol_type = other RNA
  modified_base 1..6: mod_base = OTHER; note = 2'-O-Methyl ribonucleotide
  modified_base 7: mod_base = OTHER; note = 2'-fluoro ribonucleotide
  modified_base 8: mod_base = OTHER; note = 2'-O-Methyl ribonucleotide
  modified_base 9: mod_base = OTHER; note = 2'-fluoro ribonucleotide
  modified_base 10: mod_base = OTHER; note = 2'-O-Methyl ribonucleotide
  modified_base 11: mod_base = OTHER; note = 2'-fluoro ribonucleotide
  modified_base 12..21: mod_base = OTHER; note = 2'-O-Methyl ribonucleotide
  modified_base 1..3: mod_base = OTHER; note = phosphorothioate linkage
ggtgacctacctttgtcaata

SEQ ID NO: 789 - RNA, 21 nt, synthetic construct
  source 1..21: mol_type = other RNA
  modified_base 1..6: mod_base = OTHER; note = 2'-O-Methyl ribonucleotide
  modified_base 7: mod_base = OTHER; note = 2'-fluoro ribonucleotide
  modified_base 8: mod_base = OTHER; note = 2'-O-Methyl ribonucleotide
  modified_base 9: mod_base = OTHER; note = 2'-fluoro ribonucleotide
  modified_base 10: mod_base = OTHER; note = 2'-O-Methyl ribonucleotide
  modified_base 11: mod_base = OTHER; note = 2'-fluoro ribonucleotide
  modified_base 12..21: mod_base = OTHER; note = 2'-O-Methyl ribonucleotide
  modified_base 1..3: mod_base = OTHER; note = phosphorothioate linkage
aattatccaatatacatgtca

SEQ ID NO: 790 - RNA, 21 nt, synthetic construct
  source 1..21: mol_type = other RNA
  modified_base 1..6: mod_base = OTHER; note = 2'-O-Methyl ribonucleotide
  modified_base 7: mod_base = OTHER; note = 2'-fluoro ribonucleotide
  modified_base 8: mod_base = OTHER; note = 2'-O-Methyl ribonucleotide
  modified_base 9: mod_base = OTHER; note = 2'-fluoro ribonucleotide
  modified_base 10: mod_base = OTHER; note = 2'-O-Methyl ribonucleotide
  modified_base 11: mod_base = OTHER; note = 2'-fluoro ribonucleotide
  modified_base 12..21: mod_base = OTHER; note = 2'-O-Methyl ribonucleotide
  modified_base 1..3: mod_base = OTHER; note = phosphorothioate linkage
attttcaggaccacagactaa

SEQ ID NO: 791 - RNA, 21 nt, synthetic construct
  source 1..21: mol_type = other RNA
  modified_base 1..6: mod_base = OTHER; note = 2'-O-Methyl ribonucleotide
  modified_base 7: mod_base = OTHER; note = 2'-fluoro ribonucleotide
  modified_base 8: mod_base = OTHER; note = 2'-O-Methyl ribonucleotide
  modified_base 9: mod_base = OTHER; note = 2'-fluoro ribonucleotide
  modified_base 10: mod_base = OTHER; note = 2'-O-Methyl ribonucleotide
  modified_base 11: mod_base = OTHER; note = 2'-fluoro ribonucleotide
  modified_base 12..21: mod_base = OTHER; note = 2'-O-Methyl ribonucleotide
  modified_base 1..3: mod_base = OTHER; note = phosphorothioate linkage
ttcaggaccacagactaagca

SEQ ID NO: 792 - RNA, 21 nt, synthetic construct
  source 1..21: mol_type = other RNA
  modified_base 1..6: mod_base = OTHER; note = 2'-O-Methyl ribonucleotide
  modified_base 7: mod_base = OTHER; note = 2'-fluoro ribonucleotide
  modified_base 8: mod_base = OTHER; note = 2'-O-Methyl ribonucleotide
  modified_base 9: mod_base = OTHER; note = 2'-fluoro ribonucleotide
  modified_base 10: mod_base = OTHER; note = 2'-O-Methyl ribonucleotide
  modified_base 11: mod_base = OTHER; note = 2'-fluoro ribonucleotide
  modified_base 12..21: mod_base = OTHER; note = 2'-O-Methyl ribonucleotide
  modified_base 1..3: mod_base = OTHER; note = phosphorothioate linkage
aggaccacagactaagctgta

SEQ ID NO: 793 - RNA, 21 nt, synthetic construct
  source 1..21: mol_type = other RNA
  modified_base 1..6: mod_base = OTHER; note = 2'-O-Methyl ribonucleotide
  modified_base 7: mod_base = OTHER; note = 2'-fluoro ribonucleotide
  modified_base 8: mod_base = OTHER; note = 2'-O-Methyl ribonucleotide
  modified_base 9: mod_base = OTHER; note = 2'-fluoro ribonucleotide
  modified_base 10: mod_base = OTHER; note = 2'-O-Methyl ribonucleotide
  modified_base 11: mod_base = OTHER; note = 2'-fluoro ribonucleotide
  modified_base 12..21: mod_base = OTHER; note = 2'-O-Methyl ribonucleotide
  modified_base 1..3: mod_base = OTHER; note = phosphorothioate linkage
tttttttagggccagaataca

SEQ ID NO: 794 - RNA, 21 nt, synthetic construct
  source 1..21: mol_type = other RNA
  modified_base 1..6: mod_base = OTHER; note = 2'-O-Methyl ribonucleotide
  modified_base 7: mod_base = OTHER; note = 2'-fluoro ribonucleotide
  modified_base 8: mod_base = OTHER; note = 2'-O-Methyl ribonucleotide
  modified_base 9: mod_base = OTHER; note = 2'-fluoro ribonucleotide
  modified_base 10: mod_base = OTHER; note = 2'-O-Methyl ribonucleotide
  modified_base 11: mod_base = OTHER; note = 2'-fluoro ribonucleotide
  modified_base 12..21: mod_base = OTHER; note = 2'-O-Methyl ribonucleotide
  modified_base 1..3: mod_base = OTHER; note = phosphorothioate linkage
ttttagggccagaataccaaa

SEQ ID NO: 795 - RNA, 21 nt, synthetic construct
  source 1..21: mol_type = other RNA
  modified_base 1..6: mod_base = OTHER; note = 2'-O-Methyl ribonucleotide
  modified_base 7: mod_base = OTHER; note = 2'-fluoro ribonucleotide
  modified_base 8: mod_base = OTHER; note = 2'-O-Methyl ribonucleotide
  modified_base 9: mod_base = OTHER; note = 2'-fluoro ribonucleotide
  modified_base 10: mod_base = OTHER; note = 2'-O-Methyl ribonucleotide
  modified_base 11: mod_base = OTHER; note = 2'-fluoro ribonucleotide
  modified_base 12..21: mod_base = OTHER; note = 2'-O-Methyl ribonucleotide
  modified_base 1..3: mod_base = OTHER; note = phosphorothioate linkage
tttagggccagaataccaaaa

SEQ ID NO: 796 - RNA, 21 nt, synthetic construct
  source 1..21: mol_type = other RNA
  modified_base 1..6: mod_base = OTHER; note = 2'-O-Methyl ribonucleotide
  modified_base 7: mod_base = OTHER; note = 2'-fluoro ribonucleotide
  modified_base 8: mod_base = OTHER; note = 2'-O-Methyl ribonucleotide
  modified_base 9: mod_base = OTHER; note = 2'-fluoro ribonucleotide
  modified_base 10: mod_base = OTHER; note = 2'-O-Methyl ribonucleotide
  modified_base 11: mod_base = OTHER; note = 2'-fluoro ribonucleotide
  modified_base 12..21: mod_base = OTHER; note = 2'-O-Methyl ribonucleotide
  modified_base 1..3: mod_base = OTHER; note = phosphorothioate linkage
tttaatatatgagttgcttca

SEQ ID NO: 797 - RNA, 23 nt, synthetic construct
  source 1..23: mol_type = other RNA
taaaagaaggagcttaattgtga

SEQ ID NO: 798 - RNA, 23 nt, synthetic construct
  source 1..23: mol_type = other RNA
tttacatcgtctaacatagcaaa

SEQ ID NO: 799 - RNA, 23 nt, synthetic construct
  source 1..23: mol_type = other RNA
ttgatcaaatatgttgagttttt

SEQ ID NO: 800 - RNA, 23 nt, synthetic construct
  source 1..23: mol_type = other RNA
tgatcataaaaagactgatcaaa

SEQ ID NO: 801 - RNA, 23 nt, synthetic construct
  source 1..23: mol_type = other RNA
tttcattgaagttttgtgatcca

SEQ ID NO: 802 - RNA, 23 nt, synthetic construct
  source 1..23: mol_type = other RNA
tattgcttcactatggagtatat

SEQ ID NO: 803 - RNA, 23 nt, synthetic construct
  source 1..23: mol_type = other RNA
tgattgcttcactatggagtata

SEQ ID NO: 804 - RNA, 23 nt, synthetic construct
  source 1..23: mol_type = other RNA
taattagattgcttcactatgga

SEQ ID NO: 805 - RNA, 23 nt, synthetic construct
  source 1..23: mol_type = other RNA
tgttggtttcgtgatttcccaag

SEQ ID NO: 806 - RNA, 23 nt, synthetic construct
  source 1..23: mol_type = other RNA
tatagttggtttcgtgatttccc

SEQ ID NO: 807 - skipped

SEQ ID NO: 808 - RNA, 23 nt, synthetic construct
  source 1..23: mol_type = other RNA
  modified_base 1: mod_base = OTHER; note = 2'-O-Methyl ribonucleotide
  modified_base 2: mod_base = OTHER; note = 2'-fluoro ribonucleotide
  modified_base 3..6: mod_base = OTHER; note = 2'-O-Methyl ribonucleotide
  modified_base 7: mod_base = OTHER; note = 2'-fluoro ribonucleotide
  modified_base 8..11: mod_base = OTHER; note = 2'-O-Methyl ribonucleotide
  modified_base 12: mod_base = OTHER; note = 2'-fluoro ribonucleotide
  modified_base 13: mod_base = OTHER; note = 2'-O-Methyl ribonucleotide
  modified_base 14: mod_base = OTHER; note = 2'-fluoro ribonucleotide
  modified_base 15: mod_base = OTHER; note = 2'-O-Methyl ribonucleotide
  modified_base 16: mod_base = OTHER; note = 2'-fluoro ribonucleotide
  modified_base 17..23: mod_base = OTHER; note = 2'-O-Methyl ribonucleotide
  modified_base 1..3: mod_base = OTHER; note = phosphorothioate linkage
  modified_base 21..23: mod_base = OTHER; note = phosphorothioate linkage
taaaagaaggagcttaattgtga

SEQ ID NO: 809 - RNA, 23 nt, synthetic construct
  source 1..23: mol_type = other RNA
  modified_base 1: mod_base = OTHER; note = 2'-O-Methyl ribonucleotide
  modified_base 2: mod_base = OTHER; note = 2'-fluoro ribonucleotide
  modified_base 3..6: mod_base = OTHER; note = 2'-O-Methyl ribonucleotide
  modified_base 7: mod_base = OTHER; note = 2'-fluoro ribonucleotide
  modified_base 8..11: mod_base = OTHER; note = 2'-O-Methyl ribonucleotide
  modified_base 12: mod_base = OTHER; note = 2'-fluoro ribonucleotide
  modified_base 13: mod_base = OTHER; note = 2'-O-Methyl ribonucleotide
  modified_base 14: mod_base = OTHER; note = 2'-fluoro ribonucleotide
  modified_base 15: mod_base = OTHER; note = 2'-O-Methyl ribonucleotide
  modified_base 16: mod_base = OTHER; note = 2'-fluoro ribonucleotide
  modified_base 17..23: mod_base = OTHER; note = 2'-O-Methyl ribonucleotide
  modified_base 1..3: mod_base = OTHER; note = phosphorothioate linkage
  modified_base 21..23: mod_base = OTHER; note = phosphorothioate linkage
tttacatcgtctaacatagcaaa

SEQ ID NO: 810 - RNA, 23 nt, synthetic construct
  source 1..23: mol_type = other RNA
  modified_base 1: mod_base = OTHER; note = 2'-O-Methyl ribonucleotide
  modified_base 2: mod_base = OTHER; note = 2'-fluoro ribonucleotide
  modified_base 3..6: mod_base = OTHER; note = 2'-O-Methyl ribonucleotide
  modified_base 7: mod_base = OTHER; note = 2'-fluoro ribonucleotide
  modified_base 8..11: mod_base = OTHER; note = 2'-O-Methyl ribonucleotide
  modified_base 12: mod_base = OTHER; note = 2'-fluoro ribonucleotide
  modified_base 13: mod_base = OTHER; note = 2'-O-Methyl ribonucleotide
  modified_base 14: mod_base = OTHER; note = 2'-fluoro ribonucleotide
  modified_base 15: mod_base = OTHER; note = 2'-O-Methyl ribonucleotide
  modified_base 16: mod_base = OTHER; note = 2'-fluoro ribonucleotide
  modified_base 17..23: mod_base = OTHER; note = 2'-O-Methyl ribonucleotide
  modified_base 1..3: mod_base = OTHER; note = phosphorothioate linkage
  modified_base 21..23: mod_base = OTHER; note = phosphorothioate linkage
ttgatcaaatatgttgagttttt

SEQ ID NO: 811 - RNA, 23 nt, synthetic construct
  source 1..23: mol_type = other RNA
  modified_base 1: mod_base = OTHER; note = 2'-O-Methyl ribonucleotide
  modified_base 2: mod_base = OTHER; note = 2'-fluoro ribonucleotide
  modified_base 3..6: mod_base = OTHER; note = 2'-O-Methyl ribonucleotide
  modified_base 7: mod_base = OTHER; note = 2'-fluoro ribonucleotide
  modified_base 8..11: mod_base = OTHER; note = 2'-O-Methyl ribonucleotide
  modified_base 12: mod_base = OTHER; note = 2'-fluoro ribonucleotide
  modified_base 13: mod_base = OTHER; note = 2'-O-Methyl ribonucleotide
  modified_base 14: mod_base = OTHER; note = 2'-fluoro ribonucleotide
  modified_base 15: mod_base = OTHER; note = 2'-O-Methyl ribonucleotide
  modified_base 16: mod_base = OTHER; note = 2'-fluoro ribonucleotide
  modified_base 17..23: mod_base = OTHER; note = 2'-O-Methyl ribonucleotide
  modified_base 1..3: mod_base = OTHER; note = phosphorothioate linkage
  modified_base 21..23: mod_base = OTHER; note = phosphorothioate linkage
tgatcataaaaagactgatcaaa

SEQ ID NO: 812 - RNA, 23 nt, synthetic construct
  source 1..23: mol_type = other RNA
  modified_base 1: mod_base = OTHER; note = 2'-O-Methyl ribonucleotide
  modified_base 2: mod_base = OTHER; note = 2'-fluoro ribonucleotide
  modified_base 3..6: mod_base = OTHER; note = 2'-O-Methyl ribonucleotide
  modified_base 7: mod_base = OTHER; note = 2'-fluoro ribonucleotide
  modified_base 8..11: mod_base = OTHER; note = 2'-O-Methyl ribonucleotide
  modified_base 12: mod_base = OTHER; note = 2'-fluoro ribonucleotide
  modified_base 13: mod_base = OTHER; note = 2'-O-Methyl ribonucleotide
  modified_base 14: mod_base = OTHER; note = 2'-fluoro ribonucleotide
  modified_base 15: mod_base = OTHER; note = 2'-O-Methyl ribonucleotide
  modified_base 16: mod_base = OTHER; note = 2'-fluoro ribonucleotide
  modified_base 17..23: mod_base = OTHER; note = 2'-O-Methyl ribonucleotide
  modified_base 1..3: mod_base = OTHER; note = phosphorothioate linkage
  modified_base 21..23: mod_base = OTHER; note = phosphorothioate linkage
tttcattgaagttttgtgatcca

SEQ ID NO: 813 - RNA, 23 nt, synthetic construct
  source 1..23: mol_type = other RNA
  modified_base 1: mod_base = OTHER; note = 2'-O-Methyl ribonucleotide
  modified_base 2: mod_base = OTHER; note = 2'-fluoro ribonucleotide
  modified_base 3..6: mod_base = OTHER; note = 2'-O-Methyl ribonucleotide
  modified_base 7: mod_base = OTHER; note = 2'-fluoro ribonucleotide
  modified_base 8..11: mod_base = OTHER; note = 2'-O-Methyl ribonucleotide
  modified_base 12: mod_base = OTHER; note = 2'-fluoro ribonucleotide
  modified_base 13: mod_base = OTHER; note = 2'-O-Methyl ribonucleotide
  modified_base 14: mod_base = OTHER; note = 2'-fluoro ribonucleotide
  modified_base 15: mod_base = OTHER; note = 2'-O-Methyl ribonucleotide
  modified_base 16: mod_base = OTHER; note = 2'-fluoro ribonucleotide
  modified_base 17..23: mod_base = OTHER; note = 2'-O-Methyl ribonucleotide
  modified_base 1..3: mod_base = OTHER; note = phosphorothioate linkage
  modified_base 21..23: mod_base = OTHER; note = phosphorothioate linkage
tattgcttcactatggagtatat

SEQ ID NO: 814 - RNA, 23 nt, synthetic construct
  source 1..23: mol_type = other RNA
  modified_base 1: mod_base = OTHER; note = 2'-O-Methyl ribonucleotide
  modified_base 2: mod_base = OTHER; note = 2'-fluoro ribonucleotide
  modified_base 3..6: mod_base = OTHER; note = 2'-O-Methyl ribonucleotide
  modified_base 7: mod_base = OTHER; note = 2'-fluoro ribonucleotide
  modified_base 8..11: mod_base = OTHER; note = 2'-O-Methyl ribonucleotide
  modified_base 12: mod_base = OTHER; note = 2'-fluoro ribonucleotide
  modified_base 13: mod_base = OTHER; note = 2'-O-Methyl ribonucleotide
  modified_base 14: mod_base = OTHER; note = 2'-fluoro ribonucleotide
  modified_base 15: mod_base = OTHER; note = 2'-O-Methyl ribonucleotide
  modified_base 16: mod_base = OTHER; note = 2'-fluoro ribonucleotide
  modified_base 17..23: mod_base = OTHER; note = 2'-O-Methyl ribonucleotide
  modified_base 1..3: mod_base = OTHER; note = phosphorothioate linkage
  modified_base 21..23: mod_base = OTHER; note = phosphorothioate linkage
tgattgcttcactatggagtata

SEQ ID NO: 815 - RNA, 23 nt, synthetic construct
  source 1..23: mol_type = other RNA
  modified_base 1: mod_base = OTHER; note = 2'-O-Methyl ribonucleotide
  modified_base 2: mod_base = OTHER; note = 2'-fluoro ribonucleotide
  modified_base 3..6: mod_base = OTHER; note = 2'-O-Methyl ribonucleotide
  modified_base 7: mod_base = OTHER; note = 2'-fluoro ribonucleotide
  modified_base 8..11: mod_base = OTHER; note = 2'-O-Methyl ribonucleotide
  modified_base 12: mod_base = OTHER; note = 2'-fluoro ribonucleotide
  modified_base 13: mod_base = OTHER; note = 2'-O-Methyl ribonucleotide
  modified_base 14: mod_base = OTHER; note = 2'-fluoro ribonucleotide
  modified_base 15: mod_base = OTHER; note = 2'-O-Methyl ribonucleotide
  modified_base 16: mod_base = OTHER; note = 2'-fluoro ribonucleotide
  modified_base 17..23: mod_base = OTHER; note = 2'-O-Methyl ribonucleotide
  modified_base 1..3: mod_base = OTHER; note = phosphorothioate linkage
  modified_base 21..23: mod_base = OTHER; note = phosphorothioate linkage
taattagattgcttcactatgga

SEQ ID NO: 816 - RNA, 23 nt, synthetic construct
  source 1..23: mol_type = other RNA
  modified_base 1: mod_base = OTHER; note = 2'-O-Methyl ribonucleotide
  modified_base 2: mod_base = OTHER; note = 2'-fluoro ribonucleotide
  modified_base 3..6: mod_base = OTHER; note = 2'-O-Methyl ribonucleotide
  modified_base 7: mod_base = OTHER; note = 2'-fluoro ribonucleotide
  modified_base 8..11: mod_base = OTHER; note = 2'-O-Methyl ribonucleotide
  modified_base 12: mod_base = OTHER; note = 2'-fluoro ribonucleotide
  modified_base 13: mod_base = OTHER; note = 2'-O-Methyl ribonucleotide
  modified_base 14: mod_base = OTHER; note = 2'-fluoro ribonucleotide
  modified_base 15: mod_base = OTHER; note = 2'-O-Methyl ribonucleotide
  modified_base 16: mod_base = OTHER; note = 2'-fluoro ribonucleotide
  modified_base 17..23: mod_base = OTHER; note = 2'-O-Methyl ribonucleotide
  modified_base 1..3: mod_base = OTHER; note = phosphorothioate linkage
  modified_base 21..23: mod_base = OTHER; note = phosphorothioate linkage
tgttggtttcgtgatttcccaag

SEQ ID NO: 817 - RNA, 23 nt, synthetic construct
  source 1..23: mol_type = other RNA
  modified_base 1: mod_base = OTHER; note = 2'-O-Methyl ribonucleotide
  modified_base 2: mod_base = OTHER; note = 2'-fluoro ribonucleotide
  modified_base 3..6: mod_base = OTHER; note = 2'-O-Methyl ribonucleotide
  modified_base 7: mod_base = OTHER; note = 2'-fluoro ribonucleotide
  modified_base 8..11: mod_base = OTHER; note = 2'-O-Methyl ribonucleotide
  modified_base 12: mod_base = OTHER; note = 2'-fluoro ribonucleotide
  modified_base 13: mod_base = OTHER; note = 2'-O-Methyl ribonucleotide
  modified_base 14: mod_base = OTHER; note = 2'-fluoro ribonucleotide
  modified_base 15: mod_base = OTHER; note = 2'-O-Methyl ribonucleotide
  modified_base 16: mod_base = OTHER; note = 2'-fluoro ribonucleotide
  modified_base 17..23: mod_base = OTHER; note = 2'-O-Methyl ribonucleotide
  modified_base 1..3: mod_base = OTHER; note = phosphorothioate linkage
  modified_base 21..23: mod_base = OTHER; note = phosphorothioate linkage
tatagttggtttcgtgatttccc

SEQ ID NO: 818 - skipped

SEQ ID NO: 819 - RNA, 21 nt, synthetic construct
  source 1..21: mol_type = other RNA
acaattaagctccttctttta

SEQ ID NO: 820 - RNA, 21 nt, synthetic construct
  source 1..21: mol_type = other RNA
tgctatgttagacgatgtaaa

SEQ ID NO: 821 - RNA, 21 nt, synthetic construct
  source 1..21: mol_type = other RNA
aaactcaacatatttgatcaa

SEQ ID NO: 822 - RNA, 21 nt, synthetic construct
  source 1..21: mol_type = other RNA
tgatcagtctttttatgatca

SEQ ID NO: 823 - RNA, 21 nt, synthetic construct
  source 1..21: mol_type = other RNA
gatcacaaaacttcaatgaaa

SEQ ID NO: 824 - RNA, 21 nt, synthetic construct
  source 1..21: mol_type = other RNA
atactccatagtgaagcaata

SEQ ID NO: 825 - RNA, 21 nt, synthetic construct
  source 1..21: mol_type = other RNA
tactccatagtgaagcaatca

SEQ ID NO: 826 - RNA, 21 nt, synthetic construct
  source 1..21: mol_type = other RNA
catagtgaagcaatctaatta

SEQ ID NO: 827 - RNA, 21 nt, synthetic construct
  source 1..21: mol_type = other RNA
tgggaaatcacgaaaccaaca

SEQ ID NO: 828 - RNA, 21 nt, synthetic construct
  source 1..21: mol_type = other RNA
gaaatcacgaaaccaactata

SEQ ID NO: 829 - skipped

SEQ ID NO: 830 - RNA, 21 nt, synthetic construct
  source 1..21: mol_type = other RNA
  modified_base 1..6: mod_base = OTHER; note = 2'-O-Methyl ribonucleotide
  modified_base 7: mod_base = OTHER; note = 2'-fluoro ribonucleotide
  modified_base 8: mod_base = OTHER; note = 2'-O-Methyl ribonucleotide
  modified_base 9: mod_base = OTHER; note = 2'-fluoro ribonucleotide
  modified_base 10: mod_base = OTHER; note = 2'-O-Methyl ribonucleotide
  modified_base 11: mod_base = OTHER; note = 2'-fluoro ribonucleotide
  modified_base 12..21: mod_base = OTHER; note = 2'-O-Methyl ribonucleotide
  modified_base 1..3: mod_base = OTHER; note = phosphorothioate linkage
acaattaagctccttctttta

SEQ ID NO: 831 - RNA, 21 nt, synthetic construct
  source 1..21: mol_type = other RNA
  modified_base 1..6: mod_base = OTHER; note = 2'-O-Methyl ribonucleotide
  modified_base 7: mod_base = OTHER; note = 2'-fluoro ribonucleotide
  modified_base 8: mod_base = OTHER; note = 2'-O-Methyl ribonucleotide
  modified_base 9: mod_base = OTHER; note = 2'-fluoro ribonucleotide
  modified_base 10: mod_base = OTHER; note = 2'-O-Methyl ribonucleotide
  modified_base 11: mod_base = OTHER; note = 2'-fluoro ribonucleotide
  modified_base 12..21: mod_base = OTHER; note = 2'-O-Methyl ribonucleotide
  modified_base 1..3: mod_base = OTHER; note = phosphorothioate linkage
tgctatgttagacgatgtaaa

SEQ ID NO: 832 - RNA, 21 nt, synthetic construct
  source 1..21: mol_type = other RNA
  modified_base 1..6: mod_base = OTHER; note = 2'-O-Methyl ribonucleotide
  modified_base 7: mod_base = OTHER; note = 2'-fluoro ribonucleotide
  modified_base 8: mod_base = OTHER; note = 2'-O-Methyl ribonucleotide
  modified_base 9: mod_base = OTHER; note = 2'-fluoro ribonucleotide
  modified_base 10: mod_base = OTHER; note = 2'-O-Methyl ribonucleotide
  modified_base 11: mod_base = OTHER; note = 2'-fluoro ribonucleotide
  modified_base 12..21: mod_base = OTHER; note = 2'-O-Methyl ribonucleotide
  modified_base 1..3: mod_base = OTHER; note = phosphorothioate linkage
aaactcaacatatttgatcaa

SEQ ID NO: 833 - RNA, 21 nt, synthetic construct
  source 1..21: mol_type = other RNA
  modified_base 1..6: mod_base = OTHER; note = 2'-O-Methyl ribonucleotide
  modified_base 7: mod_base = OTHER; note = 2'-fluoro ribonucleotide
  modified_base 8: mod_base = OTHER; note = 2'-O-Methyl ribonucleotide
  modified_base 9: mod_base = OTHER; note = 2'-fluoro ribonucleotide
  modified_base 10: mod_base = OTHER; note = 2'-O-Methyl ribonucleotide
  modified_base 11: mod_base = OTHER; note = 2'-fluoro ribonucleotide
  modified_base 12..21: mod_base = OTHER; note = 2'-O-Methyl ribonucleotide
  modified_base 1..3: mod_base = OTHER; note = phosphorothioate linkage
tgatcagtctttttatgatca

SEQ ID NO: 834 - RNA, 21 nt, synthetic construct
  source 1..21: mol_type = other RNA
  modified_base 1..6: mod_base = OTHER; note = 2'-O-Methyl ribonucleotide
  modified_base 7: mod_base = OTHER; note = 2'-fluoro ribonucleotide
  modified_base 8: mod_base = OTHER; note = 2'-O-Methyl ribonucleotide
  modified_base 9: mod_base = OTHER; note = 2'-fluoro ribonucleotide
  modified_base 10: mod_base = OTHER; note = 2'-O-Methyl ribonucleotide
  modified_base 11: mod_base = OTHER; note = 2'-fluoro ribonucleotide
  modified_base 12..21: mod_base = OTHER; note = 2'-O-Methyl ribonucleotide
  modified_base 1..3: mod_base = OTHER; note = phosphorothioate linkage
gatcacaaaacttcaatgaaa

SEQ ID NO: 835 - RNA, 21 nt, synthetic construct
  source 1..21: mol_type = other RNA
  modified_base 1..6: mod_base = OTHER; note = 2'-O-Methyl ribonucleotide
  modified_base 7: mod_base = OTHER; note = 2'-fluoro ribonucleotide
  modified_base 8: mod_base = OTHER; note = 2'-O-Methyl ribonucleotide
  modified_base 9: mod_base = OTHER; note = 2'-fluoro ribonucleotide
  modified_base 10: mod_base = OTHER; note = 2'-O-Methyl ribonucleotide
  modified_base 11: mod_base = OTHER; note = 2'-fluoro ribonucleotide
  modified_base 12..21: mod_base = OTHER; note = 2'-O-Methyl ribonucleotide
  modified_base 1..3: mod_base = OTHER; note = phosphorothioate linkage
atactccatagtgaagcaata

SEQ ID NO: 836 - RNA, 21 nt, synthetic construct
  source 1..21: mol_type = other RNA
  modified_base 1..6: mod_base = OTHER; note = 2'-O-Methyl ribonucleotide
  modified_base 7: mod_base = OTHER; note = 2'-fluoro ribonucleotide
  modified_base 8: mod_base = OTHER; note = 2'-O-Methyl ribonucleotide
  modified_base 9: mod_base = OTHER; note = 2'-fluoro ribonucleotide
  modified_base 10: mod_base = OTHER; note = 2'-O-Methyl ribonucleotide
  modified_base 11: mod_base = OTHER; note = 2'-fluoro ribonucleotide
  modified_base 12..21: mod_base = OTHER; note = 2'-O-Methyl ribonucleotide
  modified_base 1..3: mod_base = OTHER; note = phosphorothioate linkage
tactccatagtgaagcaatca

SEQ ID NO: 837 - RNA, 21 nt, synthetic construct
  source 1..21: mol_type = other RNA
  modified_base 1..6: mod_base = OTHER; note = 2'-O-Methyl ribonucleotide
  modified_base 7: mod_base = OTHER; note = 2'-fluoro ribonucleotide
  modified_base 8: mod_base = OTHER; note = 2'-O-Methyl ribonucleotide
  modified_base 9: mod_base = OTHER; note = 2'-fluoro ribonucleotide
  modified_base 10: mod_base = OTHER; note = 2'-O-Methyl ribonucleotide
  modified_base 11: mod_base = OTHER; note = 2'-fluoro ribonucleotide
  modified_base 12..21: mod_base = OTHER; note = 2'-O-Methyl ribonucleotide
  modified_base 1..3: mod_base = OTHER; note = phosphorothioate linkage
catagtgaagcaatctaatta

SEQ ID NO: 838 - RNA, 21 nt, synthetic construct
  source 1..21: mol_type = other RNA
  modified_base 1..6: mod_base = OTHER; note = 2'-O-Methyl ribonucleotide
  modified_base 7: mod_base = OTHER; note = 2'-fluoro ribonucleotide
  modified_base 8: mod_base = OTHER; note = 2'-O-Methyl ribonucleotide
  modified_base 9: mod_base = OTHER; note = 2'-fluoro ribonucleotide
  modified_base 10: mod_base = OTHER; note = 2'-O-Methyl ribonucleotide
  modified_base 11: mod_base = OTHER; note = 2'-fluoro ribonucleotide
  modified_base 12..21: mod_base = OTHER; note = 2'-O-Methyl ribonucleotide
  modified_base 1..3: mod_base = OTHER; note = phosphorothioate linkage
tgggaaatcacgaaaccaaca

SEQ ID NO: 839 - RNA, 21 nt, synthetic construct
  source 1..21: mol_type = other RNA
  modified_base 1..6: mod_base = OTHER; note = 2'-O-Methyl ribonucleotide
  modified_base 7: mod_base = OTHER; note = 2'-fluoro ribonucleotide
  modified_base 8: mod_base = OTHER; note = 2'-O-Methyl ribonucleotide
  modified_base 9: mod_base = OTHER; note = 2'-fluoro ribonucleotide
  modified_base 10: mod_base = OTHER; note = 2'-O-Methyl ribonucleotide
  modified_base 11: mod_base = OTHER; note = 2'-fluoro ribonucleotide
  modified_base 12..21: mod_base = OTHER; note = 2'-O-Methyl ribonucleotide
  modified_base 1..3: mod_base = OTHER; note = phosphorothioate linkage
gaaatcacgaaaccaactata

SEQ ID NO: 840-849 - skipped (10 entries)

SEQ ID NO: 850 - RNA, 22 nt, synthetic construct
  source 1..22: mol_type = other RNA
tagagttaaccttccattttga

SEQ ID NO: 851 - RNA, 22 nt, synthetic construct
  source 1..22: mol_type = other RNA
tagagataaccttccattttga

SEQ ID NO: 852 - RNA, 22 nt, synthetic construct
  source 1..22: mol_type = other RNA
tagagtaaaccttccattttga

SEQ ID NO: 853 - RNA, 23 nt, synthetic construct
  source 1..23: mol_type = other RNA
tagagtataaccttccattttga

SEQ ID NO: 854 - RNA, 23 nt, synthetic construct
  source 1..23: mol_type = other RNA
tagagtataaccttccatttcga

SEQ ID NO: 855 - RNA, 23 nt, synthetic construct
  source 1..23: mol_type = other RNA
tagagtataaccttccattccga

SEQ ID NO: 856 - RNA, 23 nt, synthetic construct
  source 1..23: mol_type = other RNA
tagagtataaccttccattttga

SEQ ID NO: 857 - RNA, 23 nt, synthetic construct
  source 1..23: mol_type = other RNA
tagagtataaccttccattttga

SEQ ID NO: 858 - RNA, 23 nt, synthetic construct
  source 1..23: mol_type = other RNA
  modified_base 1: mod_base = OTHER; note = 2'-O-Methyl ribonucleotide
  modified_base 2: mod_base = OTHER; note = 2'-fluoro ribonucleotide
  modified_base 3..6: mod_base = OTHER; note = 2'-O-Methyl ribonucleotide
  modified_base 7: mod_base = OTHER; note = acyclic N-acetyl L-threoninol abasic nucleic acid-3'phosphate
  modified_base 8..11: mod_base = OTHER; note = 2'-O-Methyl ribonucleotide
  modified_base 12: mod_base = OTHER; note = 2'-fluoro ribonucleotide
  modified_base 13: mod_base = OTHER; note = 2'-O-Methyl ribonucleotide
  modified_base 14: mod_base = OTHER; note = 2'-fluoro ribonucleotide
  modified_base 15: mod_base = OTHER; note = 2'-O-Methyl ribonucleotide
  modified_base 16: mod_base = OTHER; note = 2'-fluoro ribonucleotide
  modified_base 17..23: mod_base = OTHER; note = 2'-O-Methyl ribonucleotide
  modified_base 1..3: mod_base = OTHER; note = phosphorothioate linkage
  modified_base 21..23: mod_base = OTHER; note = phosphorothioate linkage
tagagtntaaccttccattttga

SEQ ID NO: 859 - RNA, 23 nt, synthetic construct
  source 1..23: mol_type = other RNA
  modified_base 1: mod_base = OTHER; note = 2'-O-Methyl ribonucleotide
  modified_base 2: mod_base = OTHER; note = 2'-fluoro ribonucleotide
  modified_base 3..6: mod_base = OTHER; note = 2'-O-Methyl ribonucleotide
  modified_base 7: mod_base = OTHER; note = 1',2'-Dideoxyribose-3'phosphate
  modified_base 8..11: mod_base = OTHER; note = 2'-O-Methyl ribonucleotide
  modified_base 12: mod_base = OTHER; note = 2'-fluoro ribonucleotide
  modified_base 13: mod_base = OTHER; note = 2'-O-Methyl ribonucleotide
  modified_base 14: mod_base = OTHER; note = 2'-fluoro ribonucleotide
  modified_base 15: mod_base = OTHER; note = 2'-O-Methyl ribonucleotide
  modified_base 16: mod_base = OTHER; note = 2'-fluoro ribonucleotide
  modified_base 17..23: mod_base = OTHER; note = 2'-O-Methyl ribonucleotide
  modified_base 1..3: mod_base = OTHER; note = phosphorothioate linkage
  modified_base 21..23: mod_base = OTHER; note = phosphorothioate linkage
tagagtntaaccttccattttga

SEQ ID NO: 860 - RNA, 23 nt, synthetic construct
  source 1..23: mol_type = other RNA
  modified_base 1: mod_base = OTHER; note = 2'-O-Methyl ribonucleotide
  modified_base 2: mod_base = OTHER; note = 2'-fluoro ribonucleotide
  modified_base 3..5: mod_base = OTHER; note = 2'-O-Methyl ribonucleotide
  modified_base 6: mod_base = OTHER; note = acyclic N-acetyl L-threoninol abasic nucleic acid-3'phosphate
  modified_base 7: mod_base = OTHER; note = 2'-fluoro ribonucleotide
  modified_base 8..11: mod_base = OTHER; note = 2'-O-Methyl ribonucleotide
  modified_base 12: mod_base = OTHER; note = 2'-fluoro ribonucleotide
  modified_base 13: mod_base = OTHER; note = 2'-O-Methyl ribonucleotide
  modified_base 14: mod_base = OTHER; note = 2'-fluoro ribonucleotide
  modified_base 15: mod_base = OTHER; note = 2'-O-Methyl ribonucleotide
  modified_base 16: mod_base = OTHER; note = 2'-fluoro ribonucleotide
  modified_base 17..23: mod_base = OTHER; note = 2'-O-Methyl ribonucleotide
  modified_base 1..3: mod_base = OTHER; note = phosphorothioate linkage
  modified_base 21..23: mod_base = OTHER; note = phosphorothioate linkage
tagagnataaccttccattttga

SEQ ID NO: 861 - RNA, 23 nt, synthetic construct
  source 1..23: mol_type = other RNA
  modified_base 1: mod_base = OTHER; note = 2'-O-Methyl ribonucleotide
  modified_base 2: mod_base = OTHER; note = 2'-fluoro ribonucleotide
  modified_base 3..5: mod_base = OTHER; note = 2'-O-Methyl ribonucleotide
  modified_base 6: mod_base = OTHER; note = 1',2'-Dideoxyribose-3'phosphate
  modified_base 7: mod_base = OTHER; note = 2'-fluoro ribonucleotide
  modified_base 8..11: mod_base = OTHER; note = 2'-O-Methyl ribonucleotide
  modified_base 12: mod_base = OTHER; note = 2'-fluoro ribonucleotide
  modified_base 13: mod_base = OTHER; note = 2'-O-Methyl ribonucleotide
  modified_base 14: mod_base = OTHER; note = 2'-fluoro ribonucleotide
  modified_base 15: mod_base = OTHER; note = 2'-O-Methyl ribonucleotide
  modified_base 16: mod_base = OTHER; note = 2'-fluoro ribonucleotide
  modified_base 17..23: mod_base = OTHER; note = 2'-O-Methyl ribonucleotide
  modified_base 1..3: mod_base = OTHER; note = phosphorothioate linkage
  modified_base 21..23: mod_base = OTHER; note = phosphorothioate linkage
tagagnataaccttccattttga

SEQ ID NO: 862 - RNA, 23 nt, synthetic construct
  source 1..23: mol_type = other RNA
  modified_base 1: mod_base = OTHER; note = 2'-O-Methyl ribonucleotide
  modified_base 2: mod_base = OTHER; note = 2'-fluoro ribonucleotide
  modified_base 3..6: mod_base = OTHER; note = 2'-O-Methyl ribonucleotide
  modified_base 7: mod_base = OTHER; note = 2'-fluoro ribonucleotide
  modified_base 8: mod_base = OTHER; note = acyclic N-acetyl L-threoninol abasic nucleic acid-3'phosphate
  modified_base 9..11: mod_base = OTHER; note = 2'-O-Methyl ribonucleotide
  modified_base 12: mod_base = OTHER; note = 2'-fluoro ribonucleotide
  modified_base 13: mod_base = OTHER; note = 2'-O-Methyl ribonucleotide
  modified_base 14: mod_base = OTHER; note = 2'-fluoro ribonucleotide
  modified_base 15: mod_base = OTHER; note = 2'-O-Methyl ribonucleotide
  modified_base 16: mod_base = OTHER; note = 2'-fluoro ribonucleotide
  modified_base 17..23: mod_base = OTHER; note = 2'-O-Methyl ribonucleotide
  modified_base 1..3: mod_base = OTHER; note = phosphorothioate linkage
  modified_base 21..23: mod_base = OTHER; note = phosphorothioate linkage
tagagtanaaccttccattttga

SEQ ID NO: 863 - RNA, 23 nt, synthetic construct
  source 1..23: mol_type = other RNA
  modified_base 1: mod_base = OTHER; note = 2'-O-Methyl ribonucleotide
  modified_base 2: mod_base = OTHER; note = 2'-fluoro ribonucleotide
  modified_base 3..6: mod_base = OTHER; note = 2'-O-Methyl ribonucleotide
  modified_base 7: mod_base = OTHER; note = acyclic L-threoninol nucleic acid-adenine-3'phosphate
  modified_base 8..11: mod_base = OTHER; note = 2'-O-Methyl ribonucleotide
  modified_base 12: mod_base = OTHER; note = 2'-fluoro ribonucleotide
  modified_base 13: mod_base = OTHER; note = 2'-O-Methyl ribonucleotide
  modified_base 14: mod_base = OTHER; note = 2'-fluoro ribonucleotide
  modified_base 15: mod_base = OTHER; note = 2'-O-Methyl ribonucleotide
  modified_base 16: mod_base = OTHER; note = 2'-fluoro ribonucleotide
  modified_base 17..23: mod_base = OTHER; note = 2'-O-Methyl ribonucleotide
  modified_base 1..3: mod_base = OTHER; note = phosphorothioate linkage
  modified_base 21..23: mod_base = OTHER; note = phosphorothioate linkage
tagagtataaccttccattttga

SEQ ID NO: 864 - RNA, 23 nt, synthetic construct
  source 1..23: mol_type = other RNA
  modified_base 1: mod_base = OTHER; note = 2'-O-Methyl ribonucleotide
  modified_base 2: mod_base = OTHER; note = 2'-fluoro ribonucleotide
  modified_base 3..6: mod_base = OTHER; note = 2'-O-Methyl ribonucleotide
  modified_base 7: mod_base = OTHER; note = 2'-fluoro ribonucleotide
  modified_base 8: mod_base = OTHER; note = 1',2'-Dideoxyribose-3'phosphate
  modified_base 9..11: mod_base = OTHER; note = 2'-O-Methyl ribonucleotide
  modified_base 12: mod_base = OTHER; note = 2'-fluoro ribonucleotide
  modified_base 13: mod_base = OTHER; note = 2'-O-Methyl ribonucleotide
  modified_base 14: mod_base = OTHER; note = 2'-fluoro ribonucleotide
  modified_base 15: mod_base = OTHER; note = 2'-O-Methyl ribonucleotide
  modified_base 16: mod_base = OTHER; note = 2'-fluoro ribonucleotide
  modified_base 17..23: mod_base = OTHER; note = 2'-O-Methyl ribonucleotide
  modified_base 1..3: mod_base = OTHER; note = phosphorothioate linkage
  modified_base 21..23: mod_base = OTHER; note = phosphorothioate linkage
tagagtanaaccttccattttga

SEQ ID NO: 865 - RNA, 23 nt, synthetic construct
  source 1..23: mol_type = other RNA
  modified_base 1: mod_base = OTHER; note = 2'-O-Methyl ribonucleotide
  modified_base 2: mod_base = OTHER; note = 2'-fluoro ribonucleotide
  modified_base 3..6: mod_base = OTHER; note = 2'-O-Methyl ribonucleotide
  modified_base 7: mod_base = OTHER; note = 2'-fluoro ribonucleotide
  modified_base 8..11: mod_base = OTHER; note = 2'-O-Methyl ribonucleotide
  modified_base 12: mod_base = OTHER; note = 2'-fluoro ribonucleotide
  modified_base 13: mod_base = OTHER; note = 2'-O-Methyl ribonucleotide
  modified_base 14: mod_base = OTHER; note = 2'-fluoro ribonucleotide
  modified_base 15: mod_base = OTHER; note = 2'-O-Methyl ribonucleotide
  modified_base 16: mod_base = OTHER; note = 2'-fluoro ribonucleotide
  modified_base 17..23: mod_base = OTHER; note = 2'-O-Methyl ribonucleotide
  modified_base 1..3: mod_base = OTHER; note = phosphorothioate linkage
  modified_base 21..23: mod_base = OTHER; note = phosphorothioate linkage
tagagtataaccttccatttcga

SEQ ID NO: 866 - RNA, 23 nt, synthetic construct
  source 1..23: mol_type = other RNA
  modified_base 1: mod_base = OTHER; note = 2'-O-Methyl ribonucleotide
  modified_base 2: mod_base = OTHER; note = 2'-fluoro ribonucleotide
  modified_base 3..6: mod_base = OTHER; note = 2'-O-Methyl ribonucleotide
  modified_base 7: mod_base = OTHER; note = 2'-fluoro ribonucleotide
  modified_base 8..11: mod_base = OTHER; note = 2'-O-Methyl ribonucleotide
  modified_base 12: mod_base = OTHER; note = 2'-fluoro ribonucleotide
  modified_base 13: mod_base = OTHER; note = 2'-O-Methyl ribonucleotide
  modified_base 14: mod_base = OTHER; note = 2'-fluoro ribonucleotide
  modified_base 15: mod_base = OTHER; note = 2'-O-Methyl ribonucleotide
  modified_base 16: mod_base = OTHER; note = 2'-fluoro ribonucleotide
  modified_base 17..23: mod_base = OTHER; note = 2'-O-Methyl ribonucleotide
  modified_base 1..3: mod_base = OTHER; note = phosphorothioate linkage
  modified_base 21..23: mod_base = OTHER; note = phosphorothioate linkage
tagagtataaccttccattccga

SEQ ID NO: 867 - RNA, 23 nt, synthetic construct
  source 1..23: mol_type = other RNA
  modified_base 1: mod_base = OTHER; note = 2'-O-Methyl ribonucleotide
  modified_base 2: mod_base = OTHER; note = 2'-fluoro ribonucleotide
  modified_base 3..5: mod_base = OTHER; note = 2'-O-Methyl ribonucleotide
  modified_base 6: mod_base = OTHER; note = acyclic L-threoninol nucleic acid-thymine-3'phosphate
  modified_base 7: mod_base = OTHER; note = 2'-fluoro ribonucleotide
  modified_base 8..11: mod_base = OTHER; note = 2'-O-Methyl ribonucleotide
  modified_base 12: mod_base = OTHER; note = 2'-fluoro ribonucleotide
  modified_base 13: mod_base = OTHER; note = 2'-O-Methyl ribonucleotide
  modified_base 14: mod_base = OTHER; note = 2'-fluoro ribonucleotide
  modified_base 15: mod_base = OTHER; note = 2'-O-Methyl ribonucleotide
  modified_base 16: mod_base = OTHER; note = 2'-fluoro ribonucleotide
  modified_base 17..23: mod_base = OTHER; note = 2'-O-Methyl ribonucleotide
  modified_base 1..3: mod_base = OTHER; note = phosphorothioate linkage
  modified_base 21..23: mod_base = OTHER; note = phosphorothioate linkage
tagagtataaccttccattttga

SEQ ID NO: 868 - RNA, 23 nt, synthetic construct
  source 1..23: mol_type = other RNA
  modified_base 1: mod_base = OTHER; note = 2'-O-Methyl ribonucleotide
  modified_base 2: mod_base = OTHER; note = 2'-fluoro ribonucleotide
  modified_base 3..6: mod_base = OTHER; note = 2'-O-Methyl ribonucleotide
  modified_base 7: mod_base = OTHER; note = 2'-fluoro ribonucleotide
  modified_base 8: mod_base = OTHER; note = acyclic L-threoninol nucleic acid-thymine-3'-phosphate
  modified_base 9..11: mod_base = OTHER; note = 2'-O-Methyl ribonucleotide
  modified_base 12: mod_base = OTHER; note = 2'-fluoro ribonucleotide
  modified_base 13: mod_base = OTHER; note = 2'-O-Methyl ribonucleotide
  modified_base 14: mod_base = OTHER; note = 2'-fluoro ribonucleotide
  modified_base 15: mod_base = OTHER; note = 2'-O-Methyl ribonucleotide
  modified_base 16: mod_base = OTHER; note = 2'-fluoro ribonucleotide
  modified_base 17..23: mod_base = OTHER; note = 2'-O-Methyl ribonucleotide
  modified_base 1..3: mod_base = OTHER; note = phosphorothioate linkage
  modified_base 21..23: mod_base = OTHER; note = phosphorothioate linkage
tagagtataaccttccattttga

SEQ ID NO: 869 - skipped

SEQ ID NO: 870 - RNA, 21 nt, synthetic construct
  source 1..21: mol_type = other RNA
aaaatggaaggttaaactcta

SEQ ID NO: 871 - RNA, 21 nt, synthetic construct
  source 1..21: mol_type = other RNA
aaaatggaaggttatgctcta

SEQ ID NO: 872 - RNA, 21 nt, synthetic construct
  source 1..21: mol_type = other RNA
aaaatggaaggttgtactcta

SEQ ID NO: 873 - RNA, 21 nt, synthetic construct
  source 1..21: mol_type = other RNA
aaaatggaaggttatactcta

SEQ ID NO: 874 - RNA, 21 nt, synthetic construct
  source 1..21: mol_type = other RNA
gaaatggaaggttatactcta

SEQ ID NO: 875 - RNA, 21 nt, synthetic construct
  source 1..21: mol_type = other RNA
ggaatggaaggttatactcta

SEQ ID NO: 876 - RNA, 21 nt, synthetic construct
  source 1..21: mol_type = other RNA
  modified_base 1..6: mod_base = OTHER; note = 2'-O-Methyl ribonucleotide
  modified_base 7: mod_base = OTHER; note = 2'-fluoro ribonucleotide
  modified_base 8: mod_base = OTHER; note = 2'-O-Methyl ribonucleotide
  modified_base 9: mod_base = OTHER; note = 2'-fluoro ribonucleotide
  modified_base 10: mod_base = OTHER; note = 2'-O-Methyl ribonucleotide
  modified_base 11: mod_base = OTHER; note = 2'-fluoro ribonucleotide
  modified_base 12..21: mod_base = OTHER; note = 2'-O-Methyl ribonucleotide
  modified_base 1..3: mod_base = OTHER; note = phosphorothioate linkage
aaaatggaaggttatgctcta

SEQ ID NO: 877 - RNA, 21 nt, synthetic construct
  source 1..21: mol_type = other RNA
  modified_base 1..6: mod_base = OTHER; note = 2'-O-Methyl ribonucleotide
  modified_base 7: mod_base = OTHER; note = 2'-fluoro ribonucleotide
  modified_base 8: mod_base = OTHER; note = 2'-O-Methyl ribonucleotide
  modified_base 9: mod_base = OTHER; note = 2'-fluoro ribonucleotide
  modified_base 10: mod_base = OTHER; note = 2'-O-Methyl ribonucleotide
  modified_base 11: mod_base = OTHER; note = 2'-fluoro ribonucleotide
  modified_base 12..21: mod_base = OTHER; note = 2'-O-Methyl ribonucleotide
  modified_base 1..3: mod_base = OTHER; note = phosphorothioate linkage
aaaatggaaggttgtactcta

SEQ ID NO: 878 - RNA, 21 nt, synthetic construct
  source 1..21: mol_type = other RNA
  modified_base 1..6: mod_base = OTHER; note = 2'-O-Methyl ribonucleotide
  modified_base 7: mod_base = OTHER; note = 2'-fluoro ribonucleotide
  modified_base 8: mod_base = OTHER; note = 2'-O-Methyl ribonucleotide
  modified_base 9: mod_base = OTHER; note = 2'-fluoro ribonucleotide
  modified_base 10: mod_base = OTHER; note = 2'-O-Methyl ribonucleotide
  modified_base 11: mod_base = OTHER; note = 2'-fluoro ribonucleotide
  modified_base 12..21: mod_base = OTHER; note = 2'-O-Methyl ribonucleotide
  modified_base 1..3: mod_base = OTHER; note = phosphorothioate linkage
aaaatggaaggttatactcta

SEQ ID NO: 879 - RNA, 21 nt, synthetic construct
  source 1..21: mol_type = other RNA
  modified_base 1..6: mod_base = OTHER; note = 2'-O-Methyl ribonucleotide
  modified_base 7: mod_base = OTHER; note = 2'-fluoro ribonucleotide
  modified_base 8: mod_base = OTHER; note = 2'-O-Methyl ribonucleotide
  modified_base 9: mod_base = OTHER; note = 2'-fluoro ribonucleotide
  modified_base 10: mod_base = OTHER; note = 2'-O-Methyl ribonucleotide
  modified_base 11: mod_base = OTHER; note = 2'-fluoro ribonucleotide
  modified_base 12..21: mod_base = OTHER; note = 2'-O-Methyl ribonucleotide
  modified_base 1..3: mod_base = OTHER; note = phosphorothioate linkage
gaaatggaaggttatactcta

SEQ ID NO: 880 - RNA, 21 nt, synthetic construct
  source 1..21: mol_type = other RNA
  modified_base 1..6: mod_base = OTHER; note = 2'-O-Methyl ribonucleotide
  modified_base 7: mod_base = OTHER; note = 2'-fluoro ribonucleotide
  modified_base 8: mod_base = OTHER; note = 2'-O-Methyl ribonucleotide
  modified_base 9: mod_base = OTHER; note = 2'-fluoro ribonucleotide
  modified_base 10: mod_base = OTHER; note = 2'-O-Methyl ribonucleotide
  modified_base 11: mod_base = OTHER; note = 2'-fluoro ribonucleotide
  modified_base 12..21: mod_base = OTHER; note = 2'-O-Methyl ribonucleotide
  modified_base 1..3: mod_base = OTHER; note = phosphorothioate linkage
ggaatggaaggttatactcta

SEQ ID NO: 881 - RNA, 21 nt, synthetic construct
  source 1..21: mol_type = other RNA
  modified_base 1..6: mod_base = OTHER; note = 2'-O-Methyl ribonucleotide
  modified_base 7: mod_base = OTHER; note = 2'-fluoro ribonucleotide
  modified_base 8: mod_base = OTHER; note = 2'-O-Methyl ribonucleotide
  modified_base 9: mod_base = OTHER; note = 2'-fluoro ribonucleotide
  modified_base 10: mod_base = OTHER; note = 2'-O-Methyl ribonucleotide
  modified_base 11: mod_base = OTHER; note = 2'-fluoro ribonucleotide
  modified_base 12..21: mod_base = OTHER; note = 2'-O-Methyl ribonucleotide
  modified_base 1..3: mod_base = OTHER; note = phosphorothioate linkage
aaaatggaaggttaaactcta

SEQ ID NO: 882-884 - skipped (3 entries)

SEQ ID NO: 885 - RNA, 21 nt, synthetic construct
  source 1..21: mol_type = other RNA
tactgatcaaatatgttgagc

SEQ ID NO: 886 - RNA, 21 nt, synthetic construct
  source 1..21: mol_type = other RNA
  modified_base 1: mod_base = OTHER; note = 2'-O-Methyl ribonucleotide
  modified_base 2: mod_base = OTHER; note = 2'-fluoro ribonucleotide
  modified_base 3: mod_base = OTHER; note = 2'-O-Methyl ribonucleotide
  modified_base 4: mod_base = OTHER; note = 2'-fluoro ribonucleotide
  modified_base 5: mod_base = OTHER; note = 2'-O-Methyl ribonucleotide
  modified_base 6: mod_base = OTHER; note = 2'-fluoro ribonucleotide
  modified_base 7: mod_base = OTHER; note = 2'-O-Methyl ribonucleotide
  modified_base 8: mod_base = OTHER; note = 2'-fluoro ribonucleotide
  modified_base 9: mod_base = OTHER; note = 2'-O-Methyl ribonucleotide
  modified_base 10: mod_base = OTHER; note = 2'-fluoro ribonucleotide
  modified_base 11: mod_base = OTHER; note = 2'-O-Methyl ribonucleotide
  modified_base 12: mod_base = OTHER; note = 2'-fluoro ribonucleotide
  modified_base 13: mod_base = OTHER; note = 2'-O-Methyl ribonucleotide
  modified_base 14: mod_base = OTHER; note = 2'-fluoro ribonucleotide
  modified_base 15: mod_base = OTHER; note = 2'-O-Methyl ribonucleotide
  modified_base 16: mod_base = OTHER; note = 2'-fluoro ribonucleotide
  modified_base 17: mod_base = OTHER; note = 2'-O-Methyl ribonucleotide
  modified_base 18: mod_base = OTHER; note = 2'-fluoro ribonucleotide
  modified_base 19: mod_base = OTHER; note = 2'-O-Methyl ribonucleotide
  modified_base 20: mod_base = OTHER; note = 2'-fluoro ribonucleotide
  modified_base 21: mod_base = OTHER; note = 2'-O-Methyl ribonucleotide
  modified_base 1..4: mod_base = OTHER; note = phosphorothioate linkage
  modified_base 20..21: mod_base = OTHER; note = phosphorothioate linkage
tactgatcaaatatgttgagc

SEQ ID NO: 887 - RNA, 21 nt, synthetic construct
  source 1..21: mol_type = other RNA
gctcaacatatttgatcagta

SEQ ID NO: 888 - RNA, 23 nt, synthetic construct
  source 1..23: mol_type = other RNA
  modified_base 1: mod_base = OTHER; note = inverted abasic deoxyribonucleotide
  modified_base 2..9: mod_base = OTHER; note = 2'-O-Methyl ribonucleotide
  modified_base 10..12: mod_base = OTHER; note = 2'-fluoro ribonucleotide
  modified_base 13..22: mod_base = OTHER; note = 2'-O-Methyl ribonucleotide
  modified_base 23: mod_base = OTHER; note = inverted abasic deoxyribonucleotide
ngctcaacatatttgatcagtan

SEQ ID NO: 889 - protein, 4 aa, Homo sapiens
RAPR

SEQ ID NO: 890 - protein, 5 aa, synthetic construct
YIGSR

SEQ ID NO: 891 - protein, 4 aa, synthetic construct
  SITE 1: note = N-formyl-methionyl
  SITE 2: note = leucyl
MLFK
